United States Patent Application Publication US 2026/0258423 A1 - sequence listing, part 59

SEQ ID NO: 301568 - DNA, 83257441 bp, Homo sapiens (residues 42,696,141-44,830,947 of 83,257,441)
  source 1..83257441: mol_type = genomic DNA
ctcttcatccaggtatgcatagagggaggtgagccagttcagatcataacctcatggtctccgttgtggcatccaggaaaacatcaaatacttaatatttgtagatcacatttgaatgtatagaggattttcacgtgtgtcacctcatgtaaccctcacaatagctccaaggggacaataggcattttttttttttttttgagatggaattttgctcttgttgcccaggctggagtgcaatggtgtgatctcagctcactgcaacctctgcctcccgggttcaagcaattcttctgcctcagcctcccgagcagctgagattacaggcatgcgccacaacgcccagctaattttgtatttttagtagagacaggagttctccatgttggtcaggctggtctcgaacacccgacctcagatgatccgcctacctcagcctcccaaagtgctgggattataagcgtgagccaccgcgcccagccagacaataggcattcttatttaagtgttttacaaatcagtaaagagcctcagaaagtaaagcggtttcagctactcaggagggtgaggcaggaaaattgcttgaacctgggaggtggaggttgcagtgagctgagatcgtgccactgcactccaggcctaggcgacagagtgagactccatctcaaaaaaataaagtggtttacccaaagtcaaaccgctggtaagctgcaaagatggggcttaaaaccagggttttaaaaaatatataggccaggtgcagcggctcacacctgtaatcccaacactttgggaggctgaagtgggaggactgcttgaggccaggagtttgagaccaacctgagcaacatagcaagacctcatcttcacaaagaaaaatatttaataaataaaataaaataataataataaaaatatatataccaaatcctacatctaggcccaggggttgcccacttcagattgagctaggactcacccagctggcaccgccagtttggacagaatgagagatctccagtatctgcccccaagtatattcccagggtccacacagttccagtccagcccacaggcatctgcttctggtccccgctccctcatcgccctccccctccccctccccacctcaggtggactacttcccactgacagagcagaagttctcgctgttggtggacagccagttggactcacccaaggccttgtatttagggcgtgtgatgggtaagctgcgggtgcggacgcgttttaggcaaggagctgtggcatatgttcctggatcctcaaggaaagtgaaggccctgggaatggctgagggcagtgggaaggatgagtgggaaacctgtggacagtgagagtggcagggcctttgggtccaagtccctctttctgggcctgcctctctctcagagacaggagtcattgacccggagatccagcgctacaacaccccaggtttctcaggctgcctgtctggtgttcgattcaacaacgtggctcccctcaagacccacttccgaacccctcgacccatgactgctgagctagctgaggcccttcgagttcagggagaactgtccgaatctaattgcggagctatgccacgtcttgtttcagaggtgccacctgagcttgatccctggtatctgcccccaggtacattcccaggacacagaggacagaagggagggatgacacggaagggaatgattcttaacatggaggaggcatctcctaactggtgctttctcctctccagacttcccctactaccatgatgaaggatgggttgccatacttttaggctgtgagtagcactgatcactaagctgacctcccaagactaccctctgactgtcagcatcctttccctgcccctgatccccaaggctgcaggatggcaaaggcactagatgcacaatggcacaaaggatgatgagacaggctatgctgaaggtgccatataactgggcagagatttttagatgtttgaggatgagacaggctatgctgaaggtgacatataactgggcagagatttttagatgtttgaggatgctacagatttttaaataaaatattaaaatgagactatagctaagggatgggaaaatggggatacagtaacacctagagagataagaaattggggtaactaccagggatgtggaaagagaatattagaaacagaaggtggcagggggtaagccaggaattcaaacctgccagacacttgagatgagtttagtgtggtcgaacagctaactgagggtcatacattatgcttttggccaaaagtaaatgtgtgtgtgtgtgtgtgtgtgtgtgtgtgtgtgtgcaggtgaaatcccaaagtgtgtgtatgtatacaggtgaaatctcaaagagtgcgtgtgtgtgtgtgtgtgtgtgtgtgtgtgtgtgtatacaggtgagatcccaaagatctgaattgtcccttttcttcttttcagttttggtggcctttctgctgctggggctggtgggaatgttggtgctcttctatctgcaaaatcatcgctataagggctcctaccataccaatgagcccaaggctgcccacgagtaccatcctggcagcaaacctcccctacccacttcaggccctgcccaggtccccacccctacagcagctcccaaccaagctccagcctcagccccagccccagccccaactccagccccagcccctggcccccgggatcagaacctaccccagatcctggaggagtccaggtctgaatgagtcagaagggcttctgggaccaattccagctcctgacattcccccagtcctgcctctcccccatcctatcagggacatttggctcctcttagctggctctgctcatccagaggatattcccccatcccccccccatcaagtttggtgggcagagctacagatgggacccaagggagtggccgagcctcactgcctaaaccaatgcccttctcatccctgtttccccaggctcctggctgtttatctgccccaaaggagaagcctcatggggttgacataggtcctttctgccatctctgttccagctgctgtcagggattaacaacagagtgtaggggagattaactgcctcccttccaatagacactatcagcagggacagatgtgtgggagtgcagggctgcagagggtatggggggaggaggctgctaaaccctatcccccagcctcccccctgccctgaagatcttccatttgcttccactcagctggaggctcaagagggcttgatggctgtcccctgcccccctccttttgttttgtacacagagaccaagaggcctcagtttagcaccttagtacctccgctgcttcacttgctttagccaaagccataaaaaacctgcaacgtagagaaaataatgcagataccctgactagccagccctctactcctccaaccttttccaagatatgcaatggcctttgtgcctgcccaaaggcttcgccccctccagtgcatgaggaaccctctttcctccgctcagagatgctgcttcatttacccaggaggtcatattctttatatatattttttgttgcaaagtgtctctctagagaaactctatatattattcgaatttttaaattatttgtttatatataaaagaaaagctcaattggctgtgctgtcctgtgctgtgctgtgcccacagtctgtagtttgcctttcctgtgttggaagtgtcgtgagtcctgctggtcacccaccagcctggtccggcctccactctgaagcagggttgagcctgctgtgctctcagacgcggagccgttccaataaagcagagtggcagagccccagtctgtgtgtggtagctggcgtcgtggttaggggataagtgggatgattttaagggaactaatctgagggctcaggaatttctagaaggagctctcagaatccttgcatcaccttccagggacttgactgactggctcttgccagaacccccatctccccctttcccagatctcagtgggtaagtggggatcagaatgctgatgcttcggcccaacctgctcctggaccccatccctggatccttccagccccaaagcacacagtacacaacttgccaaaatggattctaacactttattaagaggtcacaagccacaggactttaaagtgcatgaaatttattggcaatgaagccgcatgtataccaggctcccctagtccccaccaccttgccccatccatcatgacgtggtggggaggggttgagacccatctttaaaagtgggggacagcagggacaaaggatgggaaactggaggaacaggagtattcatgaactgaagctgggacaggagactgaccacagtgattctgctcactgaaggaagggtggggtcagtctagtctctcaaaggctggtgaaaagttttttttcacctattcctcacagcgagcccctggcatttcaaatagacctaactcctcctcttcatctttctctggttttctcctctatgagtaatttggaacccacagtccagcttgagggtatccctgatatgcacaatgaatacaaaccacggcggatgcagatttcaggatcatgctggggcctggcccatttgggtgggaggagctttctgtcaggagttgctgggtgcggggtacgtgtgtgccctccagtgtggtgagtgagagcatgtgagtgtgtgtgcatgtcccataccaaaccgtaagaggcagctgggtcaggaggaaccccacttcttccttcatgggacaacaagtggagtgggaagaagcggggctctgagtcccagaaagaagggagaagcctgctccctactgtaacactcccaggccaatctatacccgcccacaccctttctactcaacatactgctccttgttcccagccagcccggcacacccaccatggacacagggcagctcttgctggccccattcacatgaaattcttctgtgtgaaactcactcgtctgcctctcccaggagatgagacaggactggaggagaatctcccaccctctcttcttccccctccctcaggagtgggatttaggcagggaccctagagaccttaggccaaactctaccccaatctatagaccttttaaaagaaatggttaaagtgctttgctctgcatgaatgccagagagggtggcaccacagcctgggacaggtggtctacctgcttcttctcccacttcagataccctctgccagtgtgccctgcacacggggtgccagcctaaacgcgtgcaatttagcccctcaccaaccttggaacatattctaactcaccctttccaaacagcaggcactacagacaggaaagcagattacaccaatctttctcctctctagtccaagcctgtgcccacctaccctgaagcgataagcaacactggccattgggccttgcctctatggggaatggaaggcctgaaaacacccacaaatccagcgagccaggatgctcacacctgccaggcatacccctaatgcttcttcaatagcagcataatgcttgcctgcagctgctaagccagaactttggaggagctggagcactggtgtctgttcccaggaatctgaaaacacttctccatctatctccagagtacacagagaaggctttctcaaagcctcctgggcccaagcttagcagtttaactactatcatctggctggttctccctctctggctaaggaaggatggcgtagctttccttcccccagccttgaatgcctgtacttagaacccacactctttcagtttgagccctgccacgagggaggaggtagtaaggtgacctgtctacctctgagttcagtctgtgctgcctgccaggctcgcctctaacccagaccacttgtaggctccagggaccacacttcacttagcctgtcctctccaggtcttaggaccacagaggtttgcctgcatcccaataacataaggactcttgatgtggaaagctacaattacaggctagcgcttgttgggaactgcctaagttgattcctgaggccacagcctggggagccgacacgaaatcacgcataagtcatccaccccagcctgtgctcgcttcttctgaggccagagaaacagtctcccatttctgtaactctctgtcctgggagaccaagccctagctgcctctgtctcccctctcattgagacagttttgtgccctctggacatggcagaggcctcactacagagggagtgggttggggggtttctcagtgtgggagacacagtgcaggagactcgagcagcagtggtgtgagcacgaaagccaagacagtgccgctaccataagtgctgccgtggggcctgggagggctaaaggacgtcggtctccctctcgatccccacgtacttgagagcatcagcttggctgtacctgtcccagagcagggaagaggaaccaggttactctcatgacttttgtgattgaaaaggcggagtcccctcccgtttcacttcccctcccactccttaagggctgtttacaatggtcccacttctgaggcaaggcaccagatatcagaacaagggacacagccttattcaccgggagactctctcctccatctccattaccctccctgagcccccaaatctattccaacagccactctttccaattcctgggccacatcccaaggaccattactggcacctcacctgtaatcaaagaagagctcttcgccagcttgaattgccctcttggcaaagatcccaatccgatggtctccattcaccatgaccactgcaagcaggataaacccgaggctaggttcctacccaactccaagtcaataaccagtaggcttctgggttgattttctccaaattcccagtgaaaacatgaatcaaatggaattagaaagtagtcaatatggtagttgcctctatgcttttagatctgttattatggcagaaaaattatctttattattattataagtggggttttttgttttgttttgttttgttttttgagacagagtcttgctctgttgcccaggctggagtgcagtggcatgatcttggctcattgcaacctctgcctccagggttcaagcgattcttgtgcctcagccacctgagtagctgggactacaggtgcacaccaccacgccccccagctgatttttgtatttttagtagagatggggtttcaccatgtttgctaggctggtcttgaactcctggcctcaagtgatccacctgcctcagcctcccaaagtgctgggattacaggcgtaagccaccacacccagcctattattattttgtgagatgggtctcactatgttgctcaggctggttaaatcatgtttgtgggaaagtgtttataatgtattcgctgaaaaaagcagattagaaaactaagattgagaggggcctaaaatgataccagatattaatcatgattatctttggacaaaaaatagctcagctaaggaaaatgttcaacaacgaatggaaatcacagtaaagaggcatccatcccccaccccacctcccaggttactgggactcacctttggcataacagttgggattcactgaatgatttgcaaatcgaattttgtttcctttccgagtagcatccactacaaaatctgtataaagtaaatcaaggaaaaccataagcacagcaggcaattccacagcttctcagcttgaatttaaaatcagttaaatggtaacagaaacactttagtctgatgggaatgttgaagcccagtgtgctaacaggagcagaggaaagcatgcagcctcagaattcagccttgtgtgggagcactccctttgggtccctctttgaattatggatcttctcatctactgggcagggagatttctcaggtaaagacgctcagcactcctattacaaacagaacccagaaatggaggttcttccaaagcaagggcactgtggcctgtgggatccccaagtgtgatcctgcccccttgctctatgcatctgctggaagattcggagctgatctaaacttggactacagcaagggcaatctggtagaaagatcaccttggggccaagtgcggtggcttactcctgtaatcctagcactttgggaggccgaggcgggtggatcacttgaggccaggagttcgataccagcctggccaacatggtgaaacccagtctctactaaaaatacaaaaatattagccgggcatggtggcaggtgcttgtagtcccagctactcgggaggctgaggcaggagaatcacttgaacccgggaggcagagggtagaggctacagtgagccaagatcgcaccattgcaccctagcctgggcaacagagcaagactccgtctcaaaaaaagaaaaaaaaaaaagaccaccttgggatgagacaaagtgacttcataccattattgaggttgaagaggaagctggacatgtatttgtcatagacctttccgcgtcgatcagcctcatcctgagagatgagctagagagatagacaaataacaaataggagtatcaggctgcctgctcagggcatggtaccctgcccccagaaagggctgggtggtatctcacatgggtgcttactgagcatcatgatgagaatcacaagagagcaagttcaagttatgctgttccaattcccacccaggccaaccagttttaaggctgaaaagagcccccctcatctcttgtgtctggagttgccaaagagttgaacagtggtttcagtactgcaaacggttctgtgggatctccccaagaggccacgtgagaacacagctgagttatttagagattaattcaaagaagcctggcccacagaaaatcagagtttctcatcagtctcccccgagtaagaatgtgggccaaaactatagcactcacctcaccacagtattcagaaatgaattcgttcttctgcacagactcctttatgaaggtgccccatccggccacatcagagggggccagcagcaggtgctggggaagagggggccaagtctcagactacagggtgtgcatgagtagggggtgtgtgctggatgtgcacatgtgtggtgggggtggggtggaaagaaccagcaactgttaagaggatctgaaagcagaaaaaggtctaacccattcttttctgcttgggagagaaaagaaaatgggaggtggtgacgaacggaaataggatatctcttcctttatccatggagccctcctgggccttagtctataggaattcactgcaatgtgtgaggtaaacatagacatcaccaaaggtgcatacacctcgcagctcctttttgtctggccagttcaaggaaccacttttctttctctttttggagatggaatctcactctgtcccaggctggagtgcagtggtgcgatctcggcttgctgcaacctccacctcccaggttcaagcgattctcctacctcagccttctgagtagctgggattacaggcatgcaccaccatgcctggctaatttttatatttttagtagagacagggtttcaccatgttgcccaggctggtctcgaactcttgacctcatgatccgctggcctcggcctcccaaactgctgggattacaggcatgagccaccacacctggccaggaaccatttttctaagccctactgggactgaagcctttattaattcagtaaatatgtgtcttttaggatttatcaagcactttcacatataaagcctcaaaagaaccagtggaaagagaatgcttgggaccgttccttccttccccctccattttatgtggtgtggggtcctgaggaaaggcctcaccttcttaagtccacgctggatgctgcagtttttacaggaaaccaccttgcagtcccagtgctctgaggccccacaggtgagacacaggtcagggtcacattctcgcactgccagatagcaaggacattgcttggtattgcactgggtcttacagcgacagccagggaaacgattctgacctgggaagggaagacaggtaagtcttagaagggaaataagctaatactggggcttgtggttgactcaagggacagcaaagaagtaaattttttgtgttcaaggatgtttggcaaaataagaggaagctcccttcccaataatcaaatacacaagttttgtccatagaaaactgagtgcttcccaacattcatgccttcgagtcaaaaaagcaggtgtggtcaagcatggtggctcatgcctgtaatcctagcactttgggaggccaaggcaggagaatcacctgagcccaggagttcaaaaccaggctgggcaacatagggagatcctgtctccacaaaaaaattaaaaaaaaaaatagccatgtgtggtgacacctgcctgtagtcccaggcttgatggatgtagggggatgaatggcttgagccagggaggttgaggctgcagtgagccataattgtgccacttctctccagcctgagcaacagagctgagatcctgtctcaaaaaaatttaaaaaatgaaaaaaaaagcaggtatactaataagaagtgtcccctagagattccccaacaatcctctccctcccactgaggtggagagtaccccagagaatatgaaatcagtgtgtttcactggtaaattgtcaccatcaaaacaagtatcattttgagaacagaatgcatccgttctatgccatccttctccacccactgcccaacccagcgcaaccacttctctgctgcggctaagatcactatctgctatgggttaggaggtatttcctccagcaaaaccgcctgggcaccaagttctgcaagctgtggggactgccatcaaactgctcagctttgagttgggaagggcatggtgggataagaagtaaaagataagtacccggatgtctctgctgacatccaggcccctgtcttctacctgatattaaaactccagctatgaaatgaaaatagacatacacagaatcacaaacaaaaaatatctgaataaaaaattttttaaaacagtattcagaaaagggaaactggggctgtaacttaaaaaaaaaaaaaagagtcccacatttcttttctttttgagacagagtcttgctctgttgcccaggctggagtgcagtggcacaatcttggctcactggcagcctctgccctctgggttcaagcagttcttgtgcctcagcctcccaagtagctgggactacaagcatgtaccaccatgtctggctaatttttgtattcttagtagagacggggttcaccatgttggccaggctggtcttgagtcctgaccttaagtgatctgcccgacttggccttccaagtgctgggattataggcgtgagccaccacacctggcctaatttttttatttttagtagagatgaggtttcgccaagttggccacgctggtcttgaactcctgacctcaagtgatccgcctacccaaagtgctgggattacaggcgtgagtgactgcgcctgctgccccccacatttcttaattctcccctagaagacaaagttgggaaagtatctgatttctgtgtaattgctgcttttagaatcatgaacctaaacgttttccagaaacgactctcccagatctcatgcacttatttcatttgtagaatccctaaaacacagcaaaggggatatcagaaggccataagcagtaaagggcacaggaatggggcaagcctagggcacactggagccaactgttttggtagactatacagaaaacgtagcacacttacagtctgggttgcactggcagaacttctcacagaaattctgagtcatgatgcaggggcaggtgctgtcacaggggcggtctgggtggtcgcagggttggtagttgtacacttgtgtggaagagttatctaggaaagaaaacagaggaggatgctgctgtgaccatactctccagctgtcttccctcccaagtgtccagctgccctgattcagaggaggctggtcctaacaatctccttggacacacatttagcacctgaagtgagaagacagggatgaccgttgttcataagctgcagtggggtgatctgctttgtggggagggtgtggagatggtctgggacaacagggaagctattctaaacattaaatgaggtctggaacctagcaaatggcacactagaaaagtcacatactggccaggcacagtggctcacgcctgtaatcccagcactttgcgaggccgaggcaggtggatcatttgaggtcaggagttcgagaccagcctggccaacatggtgaaaccccgtctctactaaaaatacaaaaattagccaggcatggtggtacatgcctgtaatcccagctacttgggaagctgaggcaggagaattgcttgaacccgggaggcggaggttgcagtgagccaagattgtgccactgcactccagcctgggtgacagagcgaggctccatctcaaaaaaaagaaaaatcacagaccacaaggcccttaatgttacctcctaagaggtcttctcagttgcagtgagaggctcagctgttctcagttgctgcagagaattctgcaatctgcggaagtggcacagggtcaacaagtgcagctggaggtggggtagggtgatgaccacagagtgaggcctccagctgaactgctgaagaatgccctggtagaacttacctttcttcagctgaatcttcctgcagtgtgcagcccacaatctgaaaaagacaggaaggacaggtctcagtcacggccctagggagctctgcaaatgcaggtaaatgacaacgtgacttgctctgagggactgtgtttgatgactggggagtatcttcccaaacccctcaacaggacgactttggtacacagaagctagagtccatcctaaatccagctggcctgtgctacaagagttaaacttaaacacaacccctcccaaacaagcaaataacataaaagaacacaacacagaaataaaagaaagcccaagcctattggtctattataaagctattgtttctctccaaatctctccctttgtctttgtggaggtggagatatgggggagtttcaagatggggaggtgggaaggcctttcaggaatcttctctgaaagaactgaaagggaggagccacagggatttccttctgtatctagaagtggtgtcagctccttcctctgataggtgatagtcactagggaacagggccagggtgcagaatttttttaaaaacttccaacctaagtaaaggctatcatgtaactcagaaaaacaacacaaaccaaacaaataaataaactctgatcagagttgagaaatgggtaaggtggtaacaaaaccaacaaggagaaatggcttcagggtggagccatgaggccagctcatgtcctattggccagaagcttaaatagaaaaacagacagttatggtccacagcactgggggacaagaagagggctgatctaaggcacagaccctcagggagcactcaggaggctggctctcagtcatgtgatgccaagctgatgggctcacacagcctgtgcggttgctaaagagggaggcagatgggaactccaaggggaggtcagagcacagggaacagcctggctgtaaaacaaaacactttgtccaacccttcttgcctgtgctttcttttcttcttctgtgaggggttcatgagctcatctgttggcagcttcaggataagtgattctttgactgcaaactgaaagacctggaagagaaatccaacgggcctgtcactcctcgagcaagggggtcaggtaagtggcccagctgggtgctggccttgggagggttctgagaaactcaggcagctgaccaagcctctcatcagtcagggagagacagagtgccactggaacattgggttactggctctgaagttcattcctaattatttatcctgactcaggaaaggagaaatactgagcacagtaataccgcccctggtcagaagctgtcacctactactctttctaccaagccacgggtagaagagtgggctgactgtgaccaacagtatcttcttctttttaggaagggcaacgctgtgccttgtgtaactgagtgtaaggcaggacaggacaggacaggaatggtttcagtgggctaaatattagctccctctgtcagtataaagataccggagcctcagccatttcaataggatgtgttttttctcttaaagcactggtttttagtttttccttttctttgttggggctattggccctttgtgggggatctttgaaaactgtaactattctcaggaaaatacagacaagaacattcttgcatacaaatccatagatggttacgttgagaacctgtgatcagggaaataggtatgagctccaaaatgaaagcaaagggcacttcagctcatggttctgtttttgtttgttttttttttttttttttaagagagagggtctcatactcttggccaggctggagtgcagtggtgccatcatagctcaatgtagtatagaactcctgggctcaagccatcttcccacctcagcctcctgagtactaggactacaggtacgtggctttttttttttttttttttttgtagaaatggggtctcactttgttgcccacactggtcctgaaatcctggcttcaagcgatcctcccaccatggcttcccaaagcactggaattctaggtgtgagccaccttgcccagtccatggttctattaattgttctcagtacaggaagcatgaagaagaggccacagagtctcctccagaaggtaggaagccaaagcattggggttcctttcctgttggacatgctggccctgacagctgcctccttgtccctgttcttcagtctgtcttctcactgtggtcttttcctgtcttttcctgggccaatcacttgaggtcaggagtttgagaccagcctggccaacatggtgaaaccccatctctactaaaaaaaaatacaaaaatggccaggcacattggctcatgcctgtaatcccagcactttgggaggccgaggcgggtggatcacctgaggtcaggagtttgagaccagcctggccaacatggtgaaaccccgtctctattacaaatacaaaattagccgggcgtggtggtgcacacctgtaatcccagctacttgggaggctgtggcagaagaatcacttgaacctgggaggcggaggctgcagtgagctgagatcatgccactgcactccagcctgggcaacagaccgagactccatctcaaaaaaacaaaacaaaaaaaattagctgggtgtggtggtgggcacctgtaatcccagttgcttgggaggatgaggcagaagaatcacttgaacttgggaggcggaggttgcagtgaaccaagattatgccactgcaccactccagcctgggcaacagagcgagattctgtctcaaaaaaaaaaaaaaattagctgggcatactggcctgcacctgtagtcccttgctacttgcttggctgaggggagaggactgcttgagcccaggaggcggaggttgcagtgagctatgatcatgccactgcactccagcctgggcgacacagtgaaaccctgtctcaaagacaaaataaagataatctagtgatagaaaatgtggagaataaaatgactgaagaggctggcggagtggtggagggagcagcagctgcagcagctgcagcagcagcagcagtgtgctcattaacaagagccacagaaagacctgggagtcccttctgggaaaggggtacacatttagaaaggaggccagagccaaaaaaaagaagcgaaagagtgtaggacccagaagcattaaatagagtccagacagaaatgagcattcagcaaggaggaggcgggtccccaaacatcattaggcctggcacttgcagaagggccatgtttgggaaactcacagaagcacaggctcatcagggactgaacttaagacaacttctctccagacccagacacacagcctggtaagatggcaaagggctggacagagcaatgcgtgaaaggaggggcccatttgttctgctgcttccagatggtacctgcttgcacgtcttggtccccagaagcctggctattgaacagaagttgttgaagtaggtgccatggaagactcgaaaaagagattcttcagccccagtccattccacaggctccgagggtgcttccactacgcagagttgaggtggggctggactagccttctgttttgtgggagtctgacagcgagagttagcctctgagaagggaagaaataacagaatcagaagaaggtagaatgcagttgtcatcagtagtttgtcacaaactcagaagtacttcattctactttaaaaggtagaacagttaggaatgaaaatattccctatctttaggccaggcatggtggctcacgcctgtaatccctgcattttgggaggccgaggtgggtggattgcttgagctcaggagttcaagaccagcctgggcaacatggcgaaaccctgtctctactaaaaatacaaaaattagccaggcagggtggctcacgcctgtaatcccagcactttaggacgccgaggcaggcggatcacctgaggtcagaagttcaagaccagcctggccaacatggcgaaaccccgtctctactaaaaatataaaaattagccgggcgtggtggcaggcacctgtaatcccagctacttgggaggctgaggcaggagaatcgcttgaacctgggaggtggaggttgcagtgagccaagatagcaccactgcactccagcctgggcaaaaaagcgagagactgtttcaaaaaaaaaaaaaaaaaaaaagaaaatattccccatctttactgtttacaaaacttgtagaaagaatttataatttttaagaggtagtaaagttaagtgtcaggcagtgatcctgggtttaccagagtccttgcatggaaagaaaaagtcttcattttctgttcatcgtacctgaagaactggaggcccagtcattgcctgtgtccctgtcactgtctccttctttagtctcagccacagcagaggctgaggcattggagcaggaagcactgactatgtggtgccttctccggcgacgaccagagcacttggagcgggggttgtggagcatggcatactcctttgctccttcctgcagtggacacattacagacaggaaataggaacaggcccatcaccatattgatctcatcatcacaaactttcatctttacaacatctgtctacaataatagtgtcttttctttttctctgtaccatataataagtatgatcatataacaatgagagctgcttaacaaaacttacgtactttttcacaaaagagttgtcctataatgtttttttgtttgtttgtttttttgagacagggtctctctctcttgcccaggatggagtgcagaggcctgctcactgcagcctcgaattcctgggctcaagtgattcccttgcctcagcctcccaagtagctaggaccacacgcacatgtcaccatgcccagctaatgtcctataatcttaaaaaagatataatctatgcatctgtgtcttcaattttccagtgagttgtatctaaaattaacttgcgtgttacttgtttggaatttgagaacacattctcctatggatgaagaaatgagattcagagaggggaagaaactagcttgagagtatgcagctaatagttccagaggggtataggaatcagggctccttgtctccctaggccactattctttccagtctaccacactttctctgtttccttaataaaatgtgtaatgcttaatctgtacaatcttactacttaattttgaaacttcctcccaaatctgtgtatgaaactcagaagaatattgtttcattattttacagctatcacccccttttttaaaaaatgaaataattatcactcacctagatcatcaatattttctcatcagacttggttttcaaagacttcctagctgtttctgaaaactaaatctatttctacaaaataaaggtttatcttccagtgacattgtctagaggcactcagaatggtccagcatttgacatacatgtaggctttcctacaatatagcttttaacaaaactaggctgtcctgagcccctggtaatagaattgattacctttataccaagagggttgggaaagcactgaaatctgcatgtggcgtgtgcccagcagacttcggggggtttgtgctatgagacctaaagttcctatgagattgtccaaaacaaaaaagcatgtcagcagggcctatggtggatccgtgtgtgctgaatgtattggtgcaggagcaagtgtgctttccttagcaagcagcagaaaattgttgtgaaagtgttgaaggcacaagcagagtcagaaagctcaatttaaaaatgaagtttttttgagtaataaaaatgaaaaaaaaataaaggttaactatcattaagggtatctggaatttggaataatatacagtaaggcctaaaggaaattccaaaagagaagtttcaaaattaactgaacctgatattatgtgcctatgctgtgtatgaagtatacagtatcaattatactattttaaacatttatatatatttacatataatttttatatattatatatataatatataatatggaaatatattatataattatataatttatataaatataaaatatatatttatataatatataaatatatgaaatttatataaatatatttatatataatttatataaatataaaatatatataatttatgtaaatataatttatatattatatatgtatttatatactatatattacatgtatttatatattatagattatatgtatttatatattatatataatagattatatgtatttatatattatatattatagattatatgtatttatatataatatatatcatagattatatgtatttatatataatatatattatagattatatgtatttatatataatataatatataatagattatatgtatttatatatatatatatttttttgagacgaggtcttgccctgtcacccaggtgagtacagtagcatgatctcagctcactgcagccttgaccttctaggctcaactgatcctcccacctcagcctcccaagtccagtccagctaatttttgtattttttatagacatggggttttgccatgttgcccaggctggtctcgaactcctaggctcaagctatccacatgcttcagccccccaaattgctgggattacaggcgtgagccaccattttaatataatggccaaacattttaacataaataaaatcaagtttccagacctaatttctaggttataagaaagaggagacagaagaacacagaaatgacactgtgaaaaaacaacagatgaatccaggatgtgggtcatcctacaagacaaccagcctggaacttttaaaaagattttaaaagtgatagaattatttgagattaaaaacgagtaaaaagacataacaaggccgggcgccttattacacctgtaatcccagtactttgggaggccaggcagtctgatcacctgaggttgggagttcaagaccagcctgaccaacacagagaaaccctgtctctactaaaaacacaaaaattagctgggcgtggtggcgcatgcctgtaatcccagctacttgggaggctgaggcaggagaatcgtttgaacccgggaggtggagattgtggtgagctgagattgcaccattgcactccagcctgggcaacaagagtgaaactctgtctcaaaaaaaaaaaaaaaaagacataataaccaaatatgatgtctgactggatgatcctggtttggaaacaaaacaaaacaaaacacaacacaaaaatacctattcttggtacagctgaaaaaaaaattgaatatattaatagaatgggtaatagaggatactatacaatttttattaattgtcctaggtgtaataatgtggttatgtaagagaatgtctttatgctgaaacatttaccaaatgagcatcacaatgtctgcaacttattgtcaaatggttcagcaaaagatatacatacgcaaatttatggagaaaggagatacagaaaaaaatgttatcaaatccaggaagaaggtatctttcaactctgcatgattgaaaatgttcttagtaaacagttgggggaaaatagtccagcattatatttaatatgcactcaaacctaaaacgcaataaaagaaaaattgtgcatacattatctctgtaagttaaacatgcatacatttcaggcattggcagcatcttcgtaatacatgtacagggtatcaaggtgactcctgtgagaagggcaatgaccttttgacttatataaatgctggtatgttgacataacatggcatatatatttttttaaggatgaagtaatttcattttattattattttttttttgagatggagtctcactatctcacccaggctggagtacagtggcgtgatctcggctcactgcagcctccacctcctgggttcaagcaattctcctgtctcagcctcctgagtagctgggattacaggcgtgcgccaccacacctggttaattttgtattttcagtagagacagggtttttccatgttgaccaggctggtctcaaactcctgacctcaggtgatccacctccctcagcctcccaaagtgctgggattataggtgtgcactacgacgcctggctgaaaaacatggagtaattttaaaagcatgatctgtggagttagaccctgacttgaatttcatcgctgccataccgctgacttatcaacaaactttaggcaaaatatataacttttgtaatccagtttcctctacctcatgacactgttataggatgaaaataagacaaggtatgttaagggtctactatgatacttggcacataggaaggagtcaatacacattaggaaaaaataaacccaataacgtctattcttttgcttttacagtacggcccattttccacatgtgtgcccaacagcattctctaccatctttccatctattatcccactaaagatggttccaaaagcacttggctggttgtataatataattttaataggtggcagaaattttatcaaggtattttattcatcgcctaggctcatcctattgtgtaaaaagcccaactgtgtctttggcaagtccagttgatctatttccttctagctctcaatatatggcttccccacaggtatgccagaccatttatgctgcttcttaaggtctgtccatcagggaacggtccatctggttgatcacaacaagacatcagcatcatcacgtgctattcgtctcatagttatatgcatttataacaagatagcaaagaaactagagtgtgtacccacccccccagcatacactttgctccaattctaacaatacagttttaggctctgaaatctaagcagatgatatttagagcaggcaagcctttaatgatcttcgaatctgcactccatcagactaactttatagtgctaccatgtctggggagttccttaagagcggtcccacagtaactggggagctccttaagagcaaaagccatgttttatttgtgctatatgacccccagagtgctgtgtactggctcacgtggcttgtgttcccagaatgaagttaataatgccagaacagcttaagaacataccagcaaaaggaagcagtctgtgccacatggttctggttcaatcttgatttctttattcttgcgtttatatacattaggggtggcatgaaaagctggaaaacaaaaactgtcttgttgccagtggtctatccacttgacaagatggggagaaacaaaagtgaattagagagctattgtaggagttagaattcgatataaacggctaccatcagggtgcacaaaattcagtcatttctgacatcaacacaatgctttcaaagctaagaggtactgagggacagataagttgctagttagtctgtccctatcatgcaaagcatgttgcactataattgagcaagggaaaatagaactggccctttgtaaaacgttagaacagaagccaggaactctatacgagaaaccagaacaaagagaaggaaatggtggctggggatggaagagaggagagcatttcaaacagagtagccccactcacggtgaaggaagcagtcgtatttaaagcagcgccggcaaaaaagtgtgtggaaggagtgcagagattgctcccgctgcacagacttggcattggggccatcgatgttgggtgtgcactgagggggaagtgcattggggtctgacatctctgttagttctcgatacctatttaagaaaagagagataagagttcctccgaggaactgcctccactgaggaaatacagattgggtactgacagtagctcacctacggtctgccaagggaggatgggtgttttttataggtctggttgataagagaatggtagataactagagtgggtccaccattgtaattatgctgggttgggcaaatgttggaaagtaaggggagggaaggatttgttaagatggtgctggagttaactctccagaaaaatggcagagtaaatgttctctgcccagactcactcaaaagccagtatacgatgacccttaatatagtaaggggggcatttagaggtaattgagtaagcaagaaataatcaaattgcgggcaaatcataatgcccttaccataaacaaagctttttactaaccaaaaattaggagggaataaaggttttgtccgagcactctgtatatggcctaagtgggacagctttccctacctctccttcatgtcatctgggacaccattctcagggaacattgaggcaattgcactgaagatcatgtcatttgggaactgtttcttggaactctttttgttgcctgaattggaaatgataaaaagctcctgagtgcgattatcagaacacgtaaacaaatctgtgtgatcttttttccttttgtcatagcattttgattacagctgctttgttaacctaaccactgattgtttggagatatataaacatcagtgctatctggacttatctgatatatgctaccagtaaataaggaagttagagtagtctacatattaacaacaaaatccacagtcccaattagaatctggatgtgaggtggctcacgcctgtaatcccagtcagtactttgagaggccgaggggagcggatcacttgaggccaggagtttgagaccagcctggccaacatggtaaaaccccaactctactaaaaatacaaaacttagctgggcatggtggtgcatgcctatagtcccagctacttagaaggctgacacacaagaatcacttgaaccagggaggtggaggttgcagtgagccgagattgtgccactgcactccaccttgggtaacagagcaagactgtgtctcaaaaaaataataaataatagattttaaaaataaaaataagaatttggaggtgaaaagagtgttcatagagaggcctgaacatagaagaatcctatcatgaagtggatgctgaagaactacactgatactataattatgatacaataaaagagaatacactatgtccctggacatatagtataattaaactattaaattttaaattaaacattagtgacatggaaaagtactcataagattaaataaaaagggatataaaatttgatatatacatatatataaattggcatgatcccaatttcacatgagacatataattagaaatgaatagcaatgattattctatcagttcttctactttcttcttcacccaagtcacagctatctgaagctatcacttaatgatcatgttctccttttaagtgaaccaacaagaagcaccaacagcctttaataggcaacaaatctttccagttcttccttcttccctatccctgtcactttaaaaaaggaataagggagccagtgctacgtaccttcaatagcatgtcgctttctctttcttgttactggcagatcttctttgctgtcatcctgctttccatctgaggtgtcattgtgcccttcctcctcctcatctgagtactgattcagggcatcgaccaactccagaaaaacagcatcactaatcagaacggatccagggatcatctctgaaacatgaggattcgaaagatgagcagtggtcacttcacattccattagtcctcctaggcaggttttcttgtactcactccagaggcccagatatgtcacatgtgtacatttttacatgggagatcaggaaattacaatcatttgattggctcctacacatgcagtgggcagctggctagagtaggaatacagctataggctttatttatttttattattttttttagacggagtttcgccttattgcccaggctggagtgcaatggcgcgatcttggctcaccgcaacctccacctcccaggttcaagtgattctcctgcctcagcctcccgagtagctgagattacgcatgtgccaccaccctggctaattttgtattttagtagagactgggtttctccatgtcaggctggtcgtgaactccagacctcaggtgatccgcccgcctcggcctaccaaaatgctgggattacaggtgtgacccaccgtgcccagccataggctttattcttactgaagaacttcacttcctcagtcacaagtcaactctgaatttctggttcaaaatctcatgaaagtgttcaaacaatctccaagtagggcagagaaaaataataaaatgaaaattctcttggctttgctgctgatgggtcagtaatgacgtctctaaatcaaaagacagcaatttttcctaaaattgtactttatggagatgtactacaatttaggaggtctttgaacactaggaggcactgtggacaaataatgtagttcaacagcatcacaacagtgcccacaattgtcaaaagagcaggtggggctgttggtttatgaagtgatggagagcctctcctctttccatttcttacacacggacagacttttctagaattatgactaaatccaaacaattggcttttaggaaattcagattattaaaaccaacttctgggagattcaggggatgcctggatcaaagaagtatgacagagagcctcattgccattctcagagaaagagaaataaagaacaaaatggtcttggatgtccttatggaaaactcctaagccctaagattaaacttatttgtacaataaactttctctccagccactgattactacataatccttttatgtcccaactccttttaaaatttaactaggatactttaaataatttttatttctgtttctgctgcttgaatcagaaataactagggtaataaaaaaaaaaaagaaagaaagaaaaaaagaaataactagggtattttgggccaggcatgttggctcactcttgtaatcccagagctttgggaggccaacgtgggaggattgcttgaggccaggagtttaagaccagcctgggcaacgtggtgagactccatctctacaaaaaattttaaaaataagccagggccgggcacggtggctcacgcctgtaatcccagcactttgggaggctgaggtgggaggatcacaaggtcaggagatcgagaccatcctggctcacacggtgaaaccccatccctactaaaaatacaaaaaagtagccgggtgtggtaggcgcctgtagtcccagctacctcgggaggctgaggcaggagaatggcatgaacccgggaggcggagcttacagtgagccgagattgtgccactgcgctccagcctgggtgacacagcgagactctgtctcaaaaaaaaaaaaaaaaaaaaaagccaggtgtggtggagtgcacctgtagtcccagccccccaggaggctaaagcaggaaaatcacttaagcccaggaggctgaggctacaataagctatgatcatgccactgcattccagcctgggtgactgagtgagtccctgtctctaaaaaaaaaataaaaaaaaaaattgggctaggcatggtggctcacgcctataatcccagcactttaggaggccgagataggtggatcacctgaggtcaggaattcgagaccagcctgaccaacatggtgaaaccccatctctactaaaaatacaagaattagctgggcatggtggcagacacctgtagtcccagctacttgggaggctgaggcagaagaatcacttgaacccaggaggcagagattgcagtgagcctagattacaccactgcactccagcctgggcaactaaggcaaaactccgtctcaaaaaaaaaaaaaaaaaaaaattaactcccagccatgtgatgacattgaaatattctgcagtgtgtaccccatggggcagaagataaaagcaagatggcaagatgatgaggtaccaaagaagaggcctgattctaacaaaattttctccaaggagttcagtaccactaccttcttcaccatggactttcccatcatagttattgatcagctcctcaataaaagtctcatcttcttctttcacttcatctcccatgtagggaatattgcacaaaaccgtctcatcttctacctgaaaccaaaccagatgtgatttattccatgaagccatcatgcatctgctctttcctatttagtggaatctttgctgagctttgtttgttgcttgagtctcctgaaaatgcctttgtcccagagtttcctgcattttaaacactggccattttgtttggccaaaaaaacctcaaatggggccaagtgtggtggctcacgcctgcaatcccagcactttgggaggccgaggcaggcggatcatgaggtcaggagatcgagaccatcctggccaacatggtgaaaccccatctctactaaaatacaaaaaattagctgggcgtggtggcgcatgcctgtagtcccagctactagggaggctgagggaggagaatcgcttgaacctgggaggcagaggttgcagtaagctgagatcgcgccactgtactccagcctggcgacacagtgagactccgtctcaaaaaaaaaaaaagtttcataagtagagagacagatggataaataaaaatgaaggcttctaagattatgatctgtaatttaactacaaaataaactgggcaatcataagacatgggtattctataagatggactaagattctccaataataaaaaaaaattatgattacaactcatgccagtcacactcaatgggaacctaaagtcaactgcagcctaggctatggatattttctggcaataaacaatagtaaataattttgggggagtggggtgctcagcagagaatatagtcattctaaaatccccaagtagcaagtaaaattattctgaagttttattctaagagatgattcccttctataaacctcgacctcattccaaccagtagtacggctatctgtcaccaggcagatgataagcaatggcagtatttagagaggaatgattatcaaaaccacaaataatcctagtaggagtcagcacaaaggcccagatgaaaggactgtgtgcacgtctgttgtctcagttgtttttgtagcatcttgcatttagagaattcagaaaggattactccatcaacagggagcagacaacctgctcaagcctcaagagtctgatttagactgcatttaactgtacataatattgggccaaggtactaagagaaaattgaaatcttgcccaatattattcatttaaaaaagaaccagcatcaattccaaagcacacatcagagagcataaaatctgacaagttagaacaacttgcaatatatattgtttagagtaagtaaattacaaccttgttctgccctgcatgtcctagctgtgttaattactggacaatctttaccctaagaggagctctggcatatcaacataacacaatcatacagtttaaataaccaccacagtgctttcaatacataccataaagttctgttggagaggggaccaggaatacatgatgggaaccaatgcaactgtgttcagtgacctcattaacatatgttggcttgcaaatcccgggaaaatgctctctatggtacactgaaatataagcaatgacatggagagggaaagacgggcatataacccaagaaagaaatgtaatttccttccaaaattggctgggcatagtggctcatgccagtaatcccagcactttgggaggccaagacaggcagatcacttgaagtcagttggagaccagccaggccaacatggtgaaaccccatctctacaaaaacataatacaaaaattagctgagcatggtggtacacacatgtaatcccagctacttgggagactgaggtatgagaatcacttgaacctgggaggcagaggttgagtgagccactgcactccagcctgggtgacagagcgagactctgtctcaagaaaaaaaagaaaaaaaagagaaaaaaaatgatcttagtagcctctagttcttacaagctaataaattaaatttttaaaattcagatggcatttaaaattataaaaaatttgaccaggcatggtggctcacgcctgtaatcccagcactttgggagaccgaggcgggtggatcatgaagtcaggagatcaagactatcctggccaacatggtgaaacccagtccctactaaaaatacaaaaattagctgggcgtggtggcacatgcctgtagtcccagctactcgggaggctgaggcaggagaattgcttgaacctgggaggtggaggttgcagtgagccaagatcacgccactgcactccagcctggcgacatagcgatactccgtctcaaaaaaaacaaaaacaaaattttaaaaacaacttaataaattcagagttttgtaacatcatctcctaaaaggaatccctagactgcaaacttgtggaaagtagaaactctttttttttttttgagacaggatctcactctgttgcccaggctgagtgcagttgtgcaatcacagctcactgcagcctctgcctcccaggctaaagccatcctccaacctcagcctcccgagaagctgggattacaggcatgtgctactacatccagttaaacagctaatttttcttttttttttttgtagagacagggtctcgctatattgcccacgctggtctccaactcctggactcaagcaatcatcctgccttagcctcccaaagtgctgggattacatgtgtgagccactatgcccagccaaaagaagggactcttattcacctttgtgtcctctatagagttcagcacagtacttcccatactcagctgatgtttacctcagctcaaactgttggtctacctgggttatacacaacagtaaagagcctctgaaagtcctaaaagatgaggaagttttctgaagacctaaactttaagacagtggacatcaacttagctgcataggtgatagggatagtacatggagaagcaaagtggtatagaaattatagtaacattctgcttcaggaaagatatttgctctcaatacactatctgcttttcgttttttgttttgagacagggtctcactctgtcgcccaggctggagtgcagttgcacgatcttggctcattgcaacctccgcctcccaggttcaagcaattctcctgcctcagcctcctgagtagctgggattataggtgcacgccaccacgctcggccaatttttgtatttttagtagagacagggtttcaccatgttggccaggctggtcttgaactcctgacctcaggtgatccacctgtcacagcctctaaaagtgctgggattacaggcatgagccactgcacccagcttctgctttttttttttttttttaagagacagtctcttttttttttttttttttgagacggagtctcgctgtcgcccaggctggagatcatagctcactgcagccttgaactcttgggttcaagtgattctcccacctcagcctcccgagtagctgggattataggcatacactaccatgcctagataatatttactttttatattttaaaaatattatctatttcccaggtgttggaggttacagtaagctatgatcatgacactgcactccagtctgggtgacatagtgagatcttgtctctaaataataataatgataatttattttcataaagtttctttttttttggagatggtgttttgctcttgttgcccaggctgaagtacaatggtgccatctcagatcactgcaacctccacctcccgggttcaagcaattctcctgcctcagcctccctagtagctgggattacagaagtgtgccaccatgcctggctaatttttttgtactattagtagagatggggtttcaccatgttggccagcctggtctcaaactcttgacctcaggtgatccacccacctcggcctcccaaagtgctgggattacaggtgtgagccaccgcgtccagccaaagtttcttaactagaaaattcttttatttatttattatttattattttttttgagacacagtctcactctttcacccaggctggagtgcagtggtgtgatcttggctcactgcaacttctgcctcctaggttcaagaggttctcaggcctcagcctcccaagtagctgggattataggtgtgcaccatcacacgcagctaacttttgtatttttagtagagacagtgtttcgctatgttggccaggctggtctcaaactcctggcctcaagtgatccatctgcctcagcctcccgaagtgctgagattacaggtgtgagccactgcgtccagcccccgtaattattcttgaagctgcagatttactatcttaattattcaaagttgactaaaatagctgtatctattaaccttaaccttatttatttatttcctttctttcctttttcttttttggacataaggtcttgtctgtcaacccagactggagtgttgtggtgaaatcatagtttatttcagccttgaacttctgggctcaagaaatccttccacctcagcctcacaagtagctaggactacaccaccatgtctggctacttttttaaaaaattttttagagacacagtctatgttgcccaggctggtctcaaactcctcacctcaagcgattttcccacctcagcctcccaaatagctgggaatacttgtgtgagccaccataccttgtcttacttattcactttctaaaaagtcacaaatataggaaaaagctttaagcccaaggaagagaggaagactgagcttaaactcccaaaagtacctttttgagaaaagggtgtccactcacaggcttcattgactgaacaggttggacacgaagcttcttccattcttcattgaggatctgggttttttcttgaacctttgcaaaatttgccacatacaaagcctagcaaagccatggaaaagattaagatatattgttattttattaattaattaataatttatttttttgagatggagtcttgctctgttgtcacccaggctggagtgtagtagcgcgatctcagctcaccacaacctccgcctcccgggttcaagcgattctcctacctcggcctcccaagtagctgggattacaggcacagaccaccacacctggctaatttttgtatttttggtagagacagggtttcactatgttggccaggctggtttgaaactcctggcctcaagtgatctgcctgcctcagcctcccaaagtgctggaattacaggcatgagccaccgtgcctggcctttttttttttttttgagatggagtcttgctctgtcacccaggctggagtgcagtggtgccatctcggctcactgcaacctctatctcctgggttcaagcaattctcctgcctcagcctcccaagtagccgggattacaggcatatgacaccacgcccggctaatttttgtatttttagtagagacgaggtttcaccaggtaggacaggctggtctcgaactcctgacctcaggtgatccacctgccttagcctcccaaagtgctgggattacaggtgtgagccaccgcacctggccctgttacgatttcaaaacaaaagttaaaaagaaattccaacccctgggccaggcgcggtggctcacacctgtaatcccagcactttgggaggctgaggcgggcggatcacgaggtcaggagatcgagaccatcctggctaacatggtgaaaccccatctctactaaaaatacaagaaaattagccgggcgtggtggcaggcgcctgtagtcccagctaatcgggaggctgaggcaggagaatggcgtgaacctgcgaggtggagcttgcagtaagctgagattacgccactgcactccaacctgggtgacagagtgagactctgtctcaaaaaaaaaaaaaaattccaacccctttacactgggtcagtatattgaaatatataaactttcacttgggaattattttttacctttgcacccatatttgcctgaagccgtttaagttgtcgaagtcgcatgtattcagatttcacttttcttttccagtaagtgatacatttggaggtagggggatttggtatttccatcttgctgtaatctaagagagacagagatgagaaatagcattttattgcctggaaataaagcattcctcaaatacaaaaaaaaaaaaaagatcaattatgctttcattcccattaaatttactcataaaaacacacatttaaagaacccaaatgtgtgagttcaacagaaagtttcaatttaaaaaaaagaggcaggggctcacacctgtaaaaccaacactttaggaagccgaggtgagagcactacttgagcccagtgatttgagacaaccttgggcaacatggtgaaaccccatctctacagaaaatacaaaagttagccagatgtgttggccagtgcctgtagtcccagctactcaggaggctgatgtgggaggactgcttgagcccaggaggtcaaggctgcattgagccgtgaccacgccactgcacttcagcctgagtgacagagtgagaccttgtctcaaaaaacaaaacaaaacaaaaaaacaaaaaacaacaagaagtccaggcacggtggctcacgcctgtaatcccagcactttgggaggccaaggtgggtggatcttctgaggtcagtagttcaagactagcctggccaacatagtgaaaccccgtctctactaaaaatacaaaaaaaaaaaaaaattagtcgggcatggtggcttgtgcctgtaatcccagttatgtgggaagctgagacacgagaatttcttgaacctgggaggtggaagttgcagtaagccgagatcgcaccactgcactccagcctgggtgacacagtgagactccatctcaaaaaagaaaaaaaaaaaagtccgggcatggtgattcatgcctgtaatcccagcactttgggaggccaaggtgggtggatcacgaggtcaggagttcaagaccagcctggccaagatgctgaaaccccgtctctactaaaaatacaaaaattagctggatgtggtggcacacgcctataatcccagctactcaggtggctgaggcaggagaatggcttgaaaccgggaggtggaagttgcagtgaaccgagatcacatcactgcactccagcctgggcgacagagcaagactccgtctcaaaacaaaaacaaaagacaaaaacaaaacaaaaaaaaacaacaacaacaaaatttcacatcagcaatttgtggtccaattatcaaaaagcttagcctctgtcctcctgtggtatcttgtttttaatttagcactcaagaagttctcccacaggtactaggaacttggattacttcaagatatggaagtcttctctttactttgagtaagagaagtggtcagcaagaaccaagtttgcatccaagggtttcatggaaagatccacccatgctacaaaaccatactgccaaatggtctaaatttaccacatgcctagtaataaaagtaggatatgacagcagtataatctcatctccaagtcagcagcaagacatatggaaatagatagcaatgcaaatccccctttttggtatttgaattaaggttcaacgttttaaagaagtatgtattctttttttttttttttttttttttttttgagacggagtctcgctctgtcgcccaggctggagtgcagtggcgcgatctcggctcactgcaagctccgcctcccgggttcacgccattctcctgcctcagcctcccgagtagctgggactacaggcgcccgctaccacgcccggctaattttttgtatttttagtagagacggggtttcaccgtgttagccaggatggtctcgatctcctgacctcgtgatccgcccgccttggcctcccaaagtgctgggattacaggcgtgagccaccgcgcccggccaagaagtatgtattctaatatactttacctaccttatagaatgcaaggggaagtgttgggttttacagtgtgcctctgttcttcaggagaatggcaggacacaacagcagaacaggtgtccagcttttcaaaagagaacagacagtggttctattaagttagtgcagcaagttagaccctgacaccctcagtaggattttcccccagaatcagaaagacttcaaggtttctcctactatttttgtatgtctaagacaggtccctataatacttgatgccatttgggaagaggccctttactttattaaattctattttttcataatgctttttttttttaaagacagagtctcactctgttgcccaagctggagtgcagtggcacaatcttggctcactgcaacctccgcctcctgggttcaagccattctcctgcctcagcctcccaagtagctgggactataggcgcgcaccaccatagccggccaaatttttttgtatttgtagtagagatgggatttcaccatctctactggggatcacctgacctcaagtgatctgcctgcctcggcctcccaaagtactgggattacaggtgcaggtgtgagccattgcacctgcccataatgcttttctgaaccaatttctaggctcagctaacaggcctgccaattattttagagaaagtacaaacactaaatacatgtaaaaattcaataaaatccacaagatgatgcttttactctataataactacttgggtttcttagataactagctctatttattccacctaacattaaaaatgtttaaaaacattacaaggagctagccaggtgcagtggctcacgcctgtgataccagcactttgggaggctgaggtcaggaattcaagaccagcctggtcaacatggtgaaaccccgtttccactaaaaaatacaaaaaaaaaaaaaattagccaggtgtggtggcaggcacctgtaatcccagctactcgggaggctgaggcaggagaatcatgtgaacccgggaggcagaggttgcagtgagctgagatcacgccattgtactgcggcctgggcaacaagagtgagactctgcctcaaaacaaaacaaaacaaaacaaaacattacaaggagctatgaagagccaaaatttgaaacagaaactaaagtttcacaccctattttttaaaatttcctacacatttatttttttcgctgaggtgagaggatcacttaagcccaggagattgaggccacagtgagccatgattgtaccactgcatccagcctgagaaactgagcaagcccctgtctcaaaaacaaaaacaaaacaaaaccaaaaaaaaaaaaggaaaagaaaagaaaaataaatgatcaggcaatgtgcagtggctcatgcctgtaattccaacactttgggaagtcaaggcaggagggttgctaagaggccaggagtttgagattagcttggccaacacagtcagatcctatctctatttttcaaaattttcttttgctgttgtttttgttattttttaaaggaaaagaggctgggtgcagtggcttacatctgtaatcccagcactttgggaggccaagctgagaggatagcctgagctcaggagtttgatacaagcctgggtaacatggtaagacctcatctctattaaaaatcaaaaacatcggccgggcgcggtggctcacgcctgtaatcccagcactttgggaggccgaggcgggcagatgatgaggtcaggagatcgagactatcctggctaaaacagtgaaaccccgtctctactaaaaatacaaaaaattagcctggcgaggtggcgggcgcctgtagtcccagctacttgggaggctgagccaggagaatggcgtgaaccccagggggcggagcctgcagtgagccgagatcgtgccactgcactccagcctgggcgatagcgagactctgtctcaaaaccaaacaaaacaaaacaaaatcaaaaacatcatccgggcatggtggtgcatgcctgtagttccaactactcaagaagctgaggtaggaggatcacttgagcctaggagatcaaggctagagtgagctactgagattgcaccactgcgctccagcctgggcaacagagtgagactctgtcacgtgcaatggctcatgcctataatttcaacactttgggactctgagaccagcctgggcaacaaagtgagacaccatctctacaaaaaaaaaaaaaaaaaagaaaaagccaggtgcgctggctcacggttgtaatcccagcactctgaaaggccgaggcgggcagatcacctgagggtgggagtttgagaccagcctgaccaacatggagaaaccccgtctctactaaaaatacaaaattagccgggcgtggtggcgcatgcctataatcccagctactctggaggctgaggcaggagaattgcttgaacctgggaggcagaagttgcgacgagccgagattgcgccattgcactccagcctgggcaacaagagcaaaactctgtctcaaaaaaaaaaaaaaaaaggtctgggcgcggtggctcacgcctgtaatcccagccagcactttgggtggccgaggtgggcggatcacgaggtcaggagatcgagaccatcctggctaacatggtgaaaccccgtctcttctaaaaatacaaaaaattagcctggcatggtggcaggcgcctgtggtctcagctactcgggaggctgaggcaggagacagccgtgaacccgggaggtggagcttgcggtgagccgagatcgcaccactgcactccagcctgggcgacagagcgagactccatctcaaaaaaaaaaaaaaaaaaaggccgggcagggtggctgacgtctgtaatctcagcactttggaaggctgaggcaggcagatcacgcggtcaagagattgagaccagcctggccagcatagtgaaaccttgtctctactaaaaatacaaaaaattagctaggcatggtggcgggtgcctgtattcccagttacttgggaggctgaggcagaagaatcgattgaacacaggaggtggaggttgcagtgagccgagacagcatcactgcattgctgcctggtgacagagcgagactccatctcaaaaaaaaaaaaaaaaaaaaaatcatcagcacggacaagaaaacaacaaaatttaacccattaccacacatataccacaataagctcatgattatatctcatgcacatggatttttttttttttttgagacggagtctcgctctgtcacccaagctggagtgtagtggcacgatcttggctcactgcagcctccacctcccaagttcaagcgatccttgtgcctcagcctcctgagttgctgacattacaccaccatgcccggccaatttttgtatttttagtagagacaaggtttcaccatgttgaccagcctggtctgaaactcctggcctcaagtgatctgcctgcctcagcctgccaaagtgctgggattacaggcatgagccaccgcgcctggccaaaataatggttttaaattgcaatccctcttccgttcctttttggcattcattttccttttttcctattttcctttttgaaatagtaagcttaggtttctccacgtatttgaaaatgaagattaccagctgggacaacatgccaaaacccagtctctacaaaaaaattacaaaaattacccgggcatggtagcctgtgcctgcagtcagtcccagctactcaggaggctgagttgggagaatcacctaagcatggggaggtagaggctgcagtgagccatgattgtgcctctgtactccagcctgggtgacagagtgaggccttgtcaaaaaaaaaaaaaaaagtaaagaaagaaagaaagaaggaaggaagggctgggcgcagtggctcacacctgtaatcccagtactttgggaggccaaggtgggcggatcacctgaggtcaggagttcgaaaccagcctggccaacatagtgaaacacatctctactaaaaacacaaaaattagccgggtgtggtggtgggtgcctgtaatcccagctacttcggaggctgaggcaggagaatcgcttgaacctgggaggcagaggttgcagtgagctgagatcgcgccactgcactccagcctgggtgacagagtgagactcggtctcaaaaaaagaagaggaaagaaaagaaaagaaaggaagaaaggaaggagggcgggagggagggaaggaaacagaaaggcagggagggaaagaaaagaaaaaagaagtattaagtaatggaatagaacataatctacagatgctgtcgtgtctggctggctgtggtggctcatgcctgtcatcccaacactttgggaggctgaggcgggtggatcacttgaggccaggagctcgagaccagcctggccaacatggtgaaaccctgactctactaaaaatacaaaatttagcaggccatgttggcacacacctgaaactcagccataagatgagttttcaccacagctggaccctaaccaacaattatcatatcaaagttaaaaaaaaaaaagggaacaaataaaaaacttagcattcactagaacaggcagatttggagagatggattcattggtgttgggcaaagggagtggcacacaaaaaaatactttatatttctaccagatctattatttagttacttacacatgcaaaacagcacttatattccagttaggtacttagctagtacttaacagcctttcattatgttcatctacacattgaagataaactccaaaacatatgctgttttgatcaagaaattaaaaaatatttatataagcaagtcctatagctcaataataagacaaatcaccaataaaaagtgagcagaaggctggatgtggtggctcatgcctgtaatcccagcactttgggaggtcaaggcgggtggatcacaaggtcaggagttcgagaccagcctgaccaacattgtgaaaccccatctctactaaaaatacaaaattagccaggcgtggtggcgtctgcctgcaatctcagctactcaggaagctgaggcaggagaattgcttaaacccaggaggcagaggttgcagtgggccaaaatcgtgccactgcactccaacctgggagacagcgagactccgtctcaaaaaaaaaaagagcagaaatttgaacagctatgtcaccagaaaagatacaggaatggcaaatgagcacacaaaaggttgctccatatcattagtcattagggaaatgcagatgaaaaatacaatgagatactattaaacaccactaccatggctaaaatgaaaaaagactgataatacaacttgttggtgaggacgtgaagcaactggaatcctcatacactgctggtaggaatgcaaagtgatatagccactgtggaaggcagtttgccagtttttcaaaaataaagctgaatatatacttaccacagaacctggcatacaatttctaattatttatccaagagaattgaaaacctatgtctccacaaagatctgtacccaaatgttcatatttatttataatagccaaaagtgaaaacaacacacatatcaatggattggctaatggatacaaaatgtagtgtgtatagatatatacacacacaatggaatactattcagcaacaaaaagccatgaatagtttctatacattcacaccacatctcaagaccattaaaagactatgctggttgagtgcagtggctcacgcctgtaatcccagcactttgggaggctgaggcaggcagatcacttgagatcaggagttcgagaccagcctggccaacatggtgaaacctcatctctacaaaaatacaaaaattagctgggcatggtggtgtgcacttgtagtctcagctgcttggaggctgaggcaggagaatcgcttgaacctagcagggcagagattgcagggaggtagagattgcagtgatctgagaatgcgccactgcactccagcctggggaacagagcgagactctgcctcattaataataatagtaataataaaatgaaaccaccatactaagtgaaaaaaataagacgcaaataactgcatatgattccacttaagatgttctgctggccagttgcagaacaggaactccctgtactagctttacaatttttttttttttttgagacagagtctcgctctgtcgcccaggctggagtgtaatgatgcaatctcggctcactgcaacctccaccttctgggctcaagcgattctcctgcctcagcctcttaagtagctgggattacaggcacatgccaccgcgccgagctaatttttgtatttttagtagagacagagtttcaccatgttgcctaggctcgtcttgaactcctgacctcaggtgatccacccgccttggcctcccaaagtgctgggattacaggcgtgagccaccgcgcccagcctacaatttttaaaataaatctaaaactattctagggcaggcgtgatggctcatgcctgaaattccaacacttttggaggctgaggcaggtggatctcttgggcccagttgttcgagaccagcctggacaacatggtgagatcccatctctacaaaagaaatacaaaaattagttgggcatggtggcgtgtgcttctagtcccagctaccagggaggctgaggtgagaagacagatggagcctgcacgatcaaggctgcaggagcaagctgtgactgcgccattgcactccagcctgggtgacagagtgagaccctgtttcaaacaaaccaaaaacaaacaaactattctttcttttttttctttcttaaaaaacaaactattctaaaaaatagagtttattttttaaaaagattaatcattggaaatacgaaccactttatttactgtcacatctctacaggaaaagaaagctataaaaatgtagcaatctttccccagaaaactggatctcaatttgctgcaaaggctaaaactagaatgtagtctgtcactaggtggaaatgggaaaacattactgaaattgtatggcaataaaaaatttaaggaacggctgggtgcggtggctcacgcctgcaatcacagcactttgggaggccgagacaggcggatcacgaggtcaggagatcaagaccatcctgggtaacacagtgaaaccccgtctctactaaaaatacaaaaaattagctgggcatggtggcgggcacctgtagtcccagctactcaggaggctgaggcaggagaatggcgtgaacccaggaggcggagcttgcagtgagccgagacggtgccactgaactccagcctgggcgacagagcaagactctgtctcaaaaaaaaaaaaaaaaaaaaaatttaaggaacaagttcttaaacttagagagactgagatcagaatacaaaagttccaaactattaaattttttcatctacataaggtgtccctttgcagaaacagcttctttgtcttaggggcaaattcagtgtctttgatagtttctcttgaataataattttattaaccagcaaggctaagtaagcctttggaggcagatggcactacagatttttattttttaattttatttatttgtatttattatttgtatttattattattttttgagacggaatctcgctctgctgggattacagacgtgagccaccgtgcccagtctattttttttatttttttttgagatggagtctcactctgttgccaggctggagtgcgttggtgcaataacagctcactgcaacctctgccccagctaatttttgtatttttagtagagacagggtttcaccatcttggccaggctggtctggaactcctaacctcaggtaattcacccaccttggcctcccaaagtgctgggattacaggcgtaagccaccgggcctggcctagattttttttttttttttttttttgagaaggagtctcactctgtcacccaggctggagtgcagtggtgctatctcagctcactgcaatctccacctcctgggttcaagcgattctcttgcctccaccccccctgagtagctgggactatgctcgccaccaagccgggttaatttctgtatttttagtagaggcggggtttcaccatgttggccaggatggtctccatctcctgacctcgtgatccacctgcctcggcctcccaaagtgctgggattacaggcgtgagctaccacgcctggcccctggcctatatttttaaatatttcatcctattccttttttgattcatagtgtaattgaaacctgaatgataggggtgaacctatccctgcaaagagctctagtaacacacctttgggtcattctggtgatcaccaatttcatcaacatttcaattaaaatcaattctgtgactaggtacacagcctgatctctcagttaggatctataaagcacatctctaatttataccctccaacttctctgaggtattttcatctgtcattagtttgagcttctgggcactacacacagaaagaaccttcctaacaggaacctgtgactctgaattctaatttaaaataaaattataacattagtatttcctagtgttgcttaattaagagaatcagatcagctgggtgcagtagctcacacctgtaatcccagcactttgggaggccaaggcgagtggatcacctgaggacaggggttcgagaccagcctaacatgcagaaaccccgtctctactaaaaatacaaaattagccgggcatggtggtggatgcctgtaatcccagctactcgggaggctgaagcaggagaatcgcttgaacccaggaggcagaggttgcaatgagctgagatcgtgccattgcactccagtctgagcaacaagagtgaaattctgtctcaaaaaaaaaattagatcgtatgcactggaggtaatggtaacaaaaatctaaacaggattagtttttttttttttgagacagagtctcgcgctgtcgcccaggctggagtgcagtggcgcgatcttggctcactgcaagctccatcccccaggttcacgccattctcctgcctcagcctcccgagtacctgggatcacaggtgcccaccaccatgcccagctaattttttgtgttttcagtagagacagggtttcaccataaacaggattagtttttatgagacccaaaggaaaatgctggctcacaggatttataactctggtttaattttatttcattttattttgttttttgagaaagggtcccactctgccgaccaggcatgatcatagctcactgcacttcgacctcccaggctcaagggatcctttggccccagcctccctagtagctgggactacgggcacatgccaccatgcctggctaattttttatattttcagtggagacaagatctttttttttttttttgaaacggagtcttgctctgttgccaggctggagtgcagtggtgcaatctcagctcactgcaacctccgcctcccgggttcaagcgattctcctgcctcagcctcccgcgtagctgggactacaggtgcaagccaccacgcccagctaatttttgcatttcagtagagacaggtttcaccatgttggccaggatgatctcgatctcttgaccttgtgatccacccgcttcggcctcccaaagtgctgggattacaggcgtgagccactacgcccagcctacaagatcttgctatgtttcccaggctggccttgaactcctgacttgaagtaatcccccttcctcagcctcccaaagggttgagattacagacatgagccaccgtgcccagtgagaacgctgacttggaagagtaaaagcaatctcctaacaggctagagccctatcttgactggttctgtactgtgtcagcccaaagtttaatactgtactgtatttagtgcctgctcatatcatccaataaaaataagactttttagtctattttgaatcaaattattcgggtaggtgagttagagaataaaacacactaaaggtactgaattccaactacccattaagtaactcatgactttagggtgtagtgtactcaagtctcaactgatgattgactgatagactaaggagtaggaaagaatccaatatgtacacagtttggacataaaacaaaacaaagaaaaagctggggactttccagaatggagaagcacaatttttctttttttaacctttaacccttcccctcaatcccaacctatctaattatcttcacttttctccacaaattgttttctcttttctctttagtttattctatgtagaaatggaattagtgtgtttttagtgttgctacctcaaatcttttctgggacgctactagtgaacaaaatagaaatagtgaacaaagtggaaactgtttttgagacagggtctccctttgtcgcccaggctagagtacagtggtgccatctcagctcactgcaacctccgccttccaggttcaagggattctcgttcctcagcctcccaagtagctgggatgacaggtgtgggatgcccacgcccagctaattgtagaaacggggtttcaccgtgttggacaggctggtcccaaactcctggcttcaagtgatcaatccctcggcctgctcccaaagtgctgggattacagctgtgagccacaacgtggggggcccaaagtgaaactttttaaacttaatctaagaccagaaaaagatatacttaatgacatgaattgttacatgtttcatataaacagcaaatcaaagggaaggaactgttgcctacagagtaatgaagccaggtttcagaccctaggaattaaaaatagacaaaattaatattttgaatcggtttcttattttgttttgagacagggtcttgctctgttgcccaggctggaatgcagtggcttgatctcggctcactgcaacctctgcctcctgggctcaagcaatcctccctactcagcctcctgagtagttgggactacaggcccacaccaccaggcctggctaatttttgtaatgtttttgtagagacagagttttgccatgttgcccaggctggtctcacacttctgaactcaagtgattcgcccacctcggcctcccaaaatactgggattacaggcatgagccacagtgtccagacttaaattggttgtttgaaggtatcatccaaaggcaaatatataagaaacaagcccgaccacatttttcttaactttcccttctcccaaatgtcttcttgggagtaaaatttcatttttagttccagcctccttattccagtgctgtctctcttttttttttttttcccaagacagagtctcactctttcgtgcccaggctggagtgcagtggtgcaatctcagctcactgcaacttcccactcccaagttcaagcgattctcccacctctgtctcccaagagctagaattataggtgtccgccaccacgtctggctaattttttgtatttttagtagagatggggtttcaccatattggccaggctggttttgaactccccgacctcaggtgatccaacagcctcagcctcccaaagtgctgggcttataggtgtaagccatcagcccagcctctagtgctgtttcaaagggcactaatgtaaccatcataatgaagaagtcatttacactttaaggaattttaagctgggccttagcatcaagttccacgattagcatacaagtactctgccagttactgacaatactagcatccggatcacctgactcccagtgccagaaatttccccactatttattccacaaatatatgttgagcacctactattatacttaatagtagtatctactatgtgttaccattttaggtgtttggggtacatcaatgaataaaacatatatccctgcctttggagttgattcattatgtttgtgacacacaacaataagcataaaccttgacaatgatagcattattacagttttatagatagtcctttctcctattatgtatgtgcgtttttaagtacttctctctcccttttttttttcttttttgagatggagtcttgctctgtcacccatgctgcaatgcagtggtgcatgtcggctcactgcaacttccacctcccaggttcaagcgattctcgtgcctcaaccccctgaatagctgggattacaggcacccaccaccacgcccagctaattcttgtatttttgtagagaaggagtttcgccatgttgcccaggcagctctcggactcttgacctcaagtgatccgcctgccttggcctcccaaagtgctgggattacaggcctgagccactgtgccaggcctcctttttttttttttttttttgacagaatctcactctgttgcccaggttgatgtgcagtggtgcaatctcggctcactgcaacctccacctcccggttcaagcgattctaatgcctcagccctcccgagtagctgggactacaggcgtgtgccaccacacctgattaatttttgtatttttagtagagatggagttgtcccatgttgcccaggctggtctcaaactcctgggctcgagtgaacggtccacctcagcctcccaaagtgttgggattacaggcatgagccaccgtgccaggctttttttttttttcttgagacagggtctcaggtgctgtcacccagactggagtgcagtggcaggatcagagctcattgcaaccttgacctcccagtctcaagcaatactcctgcttcagcctcccaagcagctgggactataggagaaggccaccacatctggctattttttttttgtagagatgaggtctcgctattgttgcctgagctggtcccaaactcctgggctcaagctattctcctgcctgggcctcccgaatgctgggatttcagatatgagccaccgagcccagtctaaagtacttatctcctaacacacactctctcctatgtaagtaatctcttttatcagtggcatatctggggattccaagacttaaaatagacaagctttcacagaaacctctaatagggttagcaccttctcaggctggaaacctccttcaatatcagtttcctaaatttaaaaaacatggggtgtgggaatttttttattcagcggcagtatggcagcaaacgtggaggagactcgcgttttcattgccatccttgcacccacctaattgttagtgtacctgagctcctttgctttcatcctcccctgccaagcgtcaggttcctatcggcctgggctacatcacatacaaccctgtatttcaccctccatattccttcacattccacggggggcactaacatccttcaggtatcccttcccttccctgctcaagaaacaattcctcagtagtcactttttattgaaataaaagtttgtcccacatttcctaacaggcatgtcccaaatacaacaccttgtctgtgcttcaaggcacttttatttatatcatttgatcctcggttgaatggtgggggtgagcgatcattggcgtgagaccaaaagtctggagtgaaggagattcttgctcagggccaggcctggggtgaggcgaccgaggcacccaggacgcacgtgaggaggcgctcactgcacttgcgcgaccctgagtcagtgctcctttacactttgtgccttgggagccttactcacctcaccctagtcccggccttgtttttactgctacccctcctcaacatccccgaaagccatcgcaagatcagccccggtctctagccctccccaagcacagctccaggtccccagagtccacctcgctaaaggcccccgcaggtgccaccgccctcccgcgccctttgggcgctggggctcccgcccaccggcccacaccgccatccaacgggattccccgtccccgagcccgcccccgccgctcctcctcccgggcacacagccctcgcagccccagacgctgtcctcgcctgggtctctctcgccccgtcgcccccattcccccaccctcggaatgaggaggggcgcctgctacccccggccaggcaggcagtgtgtccctcggattccttccaatttcctgatccctccgcctctccctccctcaggcccagggcggcgaggggaggaggcccggccccaccgcccggcccaggcttgtttactcactcaccctccatcccgagccgcgggtcccgctgctaggacgcatgcgcgccgcggccccacccctgcgccgtgccccgccccgcgcctcctgtcggcgcgtgcgcattgacttacccgtgccgcgcggacgcactactgtcatttgccgccaaaaccccgcactcaggagtcctggcgggtgcagcctcccagacggcttccaaagcggcgctggcaggggaggggaagggctctggggaaaccttcgcagagccactaatatcttcctgaagaccctattcagcggatttgccatccccacgcgctggtgacaagccacatctcacttcagcgtttgaagccaacccagatcaccttcataccgatgcttcacccctaccagttctccagacaccggtctatgggttctaagccctttatttatgtctgatctccctatttctgttcatagttttctagtcacttagaatcaaaattatagccttgtatcgaaataaatccccacaagacacctgctagttacaaagggaaaaaaatagcaactttacagataagaatctgtcagacaccaccttaactaagtgatcaaagttagcatcactagtgataagaggtattgttttcttcttctttttttgccggggggcgaggctggacggagtctcgctttgttacttacacaggctggagtgccgtggcgcgatctcggctcactgcaacctctccctcccgggctcaagcaattctcccgcctcagcctcccaagtagccaggaatacaggttcgtgccaccacgcccggctaatttttgtatttttagtagagatggggtttcaccgtattggccaggctgctgtcaaactcctgacctcaagtgatctgcctacctcggcctcccaaagtgctgagattaccggcatgagccaccacgcccggcctccctcttctttttaaggagacagggtcttgctgtgttgcctaggctggtcttgaactccagggttcaagccatcctcccaccttgatttcccaaagtgttgggattacaggcatgagccattgcccccagctgagaggtattcttaccaggtccctctgaacatgatgcaatgagaagcgcacaaaatcacttctgtggtattcttgacgaacacgcataagctgattttttgtgcgtgttgtttgtttgtttgttttgagacagtttcactcttgttgcctaggctggagtgcaatggtgcaatctcggctcactgcaatctctgcctcctgggttcaagcgattctcctgcctcagcctcccaagtagctgggtttacaggcatgcactactatacccggcaaattttgtaattttagtagagatggggtttcaccatgttgtccaggctggtctcgaactgctgactcaggtgatccccccacctctgcctcccagtgctgggattacaggcatgagccacaatgcccagcctgcataagctgaatttaattatgaggaaacatcagacaaatccaaaatgagagacaatctacaaaataactggccagtatcttcaagtgtcaagatcatgaaagacaaggggtgagaaaccatctcagattgggagactgaggagatatgacaactaaatgtaatgtgtgatcctggcttgaatcctggtccagaaaaagaacaccagtgggataatttgatgaaattagaataaaatctctagattaattaatagtattttatcaatcttattcctggttttaatcattgtaattgaggaagtttgatggacatataggaactctaccatatttgcaactctattaaatctgaaattatttcaaaatataaatttttaaaattacaaattaaaatgcaaaataataacatcttgattttgattttgtctcaaagtgtataattagaaaagcttataatgttcattttttcaagtaatcttcataacaactgtatgaagtacgtagggcaacttcagtttacacatcaggttattctggcctaaaggagttagaagacttgccttacacagatgaataattctgtcaggtcttaaactcaggtcgctggattccaaccagatttagtgttcttttccttatataaaaactttgctgtttttcccttgcccctatccatttaactaccaaatcaaggaaaatattcctttatactggcattcctttctgttcccgctgccttcaagataagtggttctcaaacttggctcacacttggggagcttggggaactttgtttttgagatggagtttcactcttgttgcccaggctggagtgcaatggcgcgatctcagcttaccgcacgcaacctctgtctcccaggctgaagcgattctcctgcctcagccttcccgagtagctgggattacaggcatgcgccaccatgcctggctaattttgtatttttagtagagacaaggtttctccatgttggtcaggctggtcttgaactcccgacctcaggtgatccgcccgccttggcctcccaaagtgctgggattataggcgtgagctaccgtgcccagccaaggagttttaaaactactgatgcccacctcccacacccaaaagtctgattaattgatctagggtatggcctgagcttcaagagtttttaaagcatccaggtgattacaatgtgtagtgaagtttgagagccactgcacaacattaataattgttgggagaaagactgtggctttagctagggagagctgtccagaagatctgaatgtcaggagagagactagtgagagatttggaaaccatcaacatattgatggtaactgaagccacagaagtggacaacactgccttaggagaagatgccaaataacaagagagtagatacaaagacattttgacataacaaagtatggttacagaaatattttcaggtggaaaggaagttgaagggatttatgccaaagctgtagatcagaatctgatctacagcctaacctaagttccctctcttcattaaaccttctagccctcctggatttcccagcccttcaacttcagtatcactttacactcactactacactgtatatctctttcacctccaccatgataggactacacacagggcttagtaaccctcattcatggaaggattacaaaaataactttcagccaggctcagtggctcacacctgtaatcccagcactttgggagaatgaggcaggcagattgcttgagttcaggaatttgagaccagcctgggcaacacgatgaaaccccgtctctacaaaaaacacaaaaaaattagccaggcatggtggtgtgggccggtagtcccaactactcaggagactgaggtgggaaaatcgcctgagtctgggaagtcaatactgcagtgaaccataattgcatcactgcactccagcttgggcaatggaatgagaacctgtctcaataatactaacaataataataaaaacaactttccacaccaccaataagcgtgaggttcttggaggaaaatttgtttgccagttgcttcctccttattgtgatgagagagtttttcctgagaccagaccctttcttagctgacatttcctgagacattatcagccaaactttagctagctcttcttctacaattctttttcttttgcaacccttcaggtctttgtcctgtaaattcgtagaaaaactgctggcaagtggtcagcaactggacctttgaaaaacagtacaatcacccctgccccactcctcccggccccacccccaggcagttaatgggagaagggaataactgtgtcactcctggcttccagttgctcatcttgctttaaattggaggcctctggggctgaaagaaactggacaaagtgtgctaagtagcctaatagggctggttctttttctgaaagttccctattgcagaaaaataaaattatgtgtttaatttttgaaacctgatgcctgatttgccttggcagctactctcctgggcttggcccagagtccagcaaccctagtatactgattaataccagctcaacttgctccctggggaagaagagcattatttacttgaccgttttcttaaatcctttttaatttccttatattttagcataatcttcttggctttaacatgctgtatctttgaccactggccccagcgaagccttagggaagaccgctctgctctgtacactcatatccccatcacaaagcaagattgtgttcaagcccatgattagaaatgacatgtcacgtgttctagtccttctgggacgggcgagttctaagtgtactttcgtcccctgctggtcctcaggccactggtagaaagggaaggagatgatgctcctcagaatccaaacagagctctctgcactagtattcctgccttccaacctgagcccccttcggacagtgacccattggcctgttgcgcccctcccttgtaatgcccacagagatatcaaacagcaattttcagaggggacacagcagactgaggaaaggctgggccacagacagtccctgacagggaactgtaaacacagctgtggagatgggagcaaaccatcctccctcccccagttccaacccagaagcagggaaaggccaccctgccatgaaaaaacaaacaagaaaacaaagcaaagcacaacccaaaagctgcacgaaggtcaccagaaactggggctgctgcccaggacttggtggggcccgttgaagtgccagacccctccctgaacacttagaggtgaaggcagctccaaagcagttgagatctggacattacagagcctggaaacagggctcaatttttgaagcctctccactccggacactttgtcctctgatcgcaaaatcctagctgtctgtcttacatacttagctcctgacccctagttgcttagggatcataataatgaattcaattcagcaagtaagaacaggcccgcaataaacccttgtccatggctgttataagtttaaactctgagtctccaaaccaaaatatcagaaagggcttccagtctttgttaattacaaaataaataattccagcaggaagggactttctcttttgggcactcatttgggtggaagtcatgccttgatttgcacataccctcaagcctccaaccccacagctagggtggtgctgctggttcttgctctcagcacagttaatgcagggtcttgatccctaagctacagccctgcctgggaagtagctctgatcgggtggacagttaacgagctgtgcttcctttttggccattagggtcctcaactgtgaaaatgaaatggcagaacaagagaaaatggtaacagctttcaaatactgagtactaactatgtacatgacactgtcctgagagctttatatctgatttcatatgaatcaggaatattctttttttttttttgaggcagagtctcgctctgtcgcccaggcttgagtgcaatggtgacatcttggctcactgcaagctccgcctcccgggttcatgccattctcctgccccaacctcctgagtagctgggactacaggcgcctgccaccatgcctggctaaattttttgtatttttagtagagacggggtttcaccgtgttagccaggatggtctcgacctcctgacctcgtgatctgcccgcctcggcctcccaaagtgctgggattacaggtatgagccacttcacccggctgaatcaggaatattcttatccccactttacagctgaggaaactagggtttagagagattctataacctgccccaggtcatccagctggtaagtggtatggccaggatttgggctgagttattctgacccacccaatcaatgctctgaaccactccactatactgcctcccttctctgaggtcgtctagctctgacatcatgattctggattttctccattgctttctgctctcaccagtggtgccagaaagagaacgtgtttgggactctagtctgcaagtccagaggaaaacagctcctgaaagttaaggggctccttacttcctctgtactggagacgccaatcaaagctggacacttgacagacccccatatcaacagggaacatacagcctgtgtggaagaaaaacaaatcctagccagacaggaaaagggagtcccctgtttctgtgacttccccttctctcttccctatcagcagggtcccacactgctgatgctgtggccttttgaacccttctgtggctaggatgaaacaccaggctacagagacactttgggagcaagagaagtggccattgtattcacagtacacacatctacaaattatatccatgatactgtatgtaaaggagcaaaaataaatcacatttatttatacatttaacaagttgcttttagtatttatattatcactagacattgcactgtgtaggaatcccatgtaatcctggcaaaatgcctgggagtcaggtatcatccacattttacagagaagaacactgaggctcagggaaatggacaacattctccatggccccaggctggtaagaaggagagctggaattcaaatccagactaggtctgtctgactccaaaatctgtatttgtttcaataaaaggagtgttgtatagtaaaaagagcaaaattatgaaactgtaaagatcccagaatatcttggaaatataattgtcataattatatgtgttacacattatgatagtaacttccatttattgcatgcttagcagtgccaggcattgggccaaatgctttacatagttcatctgtaccgctcagcgagatacacgctagtgatcccattttgcagataagatgacaagctcagaggagttaagtaacttacacagtcttttttttttttttagacgaagtcttgctgtgtcgcccaagctggagtgtagtggtgcaatcttggctcaccgcaacctccgtctcccaggttcaagcaattctgcctcagcctcccaagtagctgggattacaggtgtgtgccactgcacctggctaattttttgtatttttagtagagacagggttttaccacattggccaggctggtcttgaactcctcacctcaggtaatccgcctggctcagcctcccaaagtgctgggattacaggtgtgagccaccatgcccagtcgcacaaagtctgatacagccaaataagcgatggagctgggatgcaaacccaggtttacttgactccaaagtgtgtgctcttaagcactaaggcagtagtaagaataatgtagtattaactatgggccaagttgtgctttaagtgctttataccttgtaacttacagatattattatcacccccattttacagatgaggaaaatattgccttttgtaacattacttatgctcacattacagacatcacacccatgtgttaaacacccatatgttactagtgtcatgtttgcttaacatatgttggatccttgcttatcatctagaaaataatgtatttttttttcattgtccatctaatgtgttaatgtgtcttgcaggaaagaatgtgaaaaggtactgtctatagacaaagtaagcataatcaggagagggacagtactgagtggggaaagacctgtgtgccctgaggggccctgtcaggttgcccttctagccaatcttcctcattctttcctattcaattctctgtagcaagttgacttctttttttttcaagctgtatccagctttattaaagatacgttccataaacaatcatggcatttcaggcaggacatgggcagacaatcgttaacagtatacaacaactttcaaactcccttcttcaatggactaccaaaaatcagaaagccactgaagtcttcatctgatgctctgaacagggaaagtttagagtgagggttgacatttcacatttagcatgttgtttaacaacttttcacaggctgaacctgactttcatgaagtgaaatgaaaatggcagaatttatctgaatatccacaatctagaaatggaaccactactcttttgacaggtgccatctcagcggcatcactggaaaatccagattgcctgacacactggtaaccaatgactagaggtcaggtcccaacagatgtctgggcttaagggagttaagtctatgctgaaggatggaaagggagaagaggacataaaaacgaatttgtttttccataccacaaggcttttgtgccaaggtggccatgtgtgtcaaagtcagggaatccctcctcctgggagccaagaggaaatctttcaaaactggaagggaaatgtgttttccccacatcaatccagctttggagacattctactagtgacatatgccccttccccaaaaaacaacaatgaagtgttctgtgtgttaacaacatagcttaaaaaaaaagtaaaacaaaattctgcatttttataaaacttgataaaaaatagtatttgaaattgtacagtcaccagaagtacacagttatcaaaaatgcacacacttcacttggcaactccagcaccttcagctttctgtgcctggtctgttttggcatctccattttctgcagggttattcccctccttgccagcatcagcttttccctttttccctttgggtatcttctctcccttctttgcaggggcctttttaggcttgggctgtggctttggaggagcaggtttagcagacaaccttgtggatcttctctatggttcgtccttcaccttggctttgtctcctttagcatcccctttagcctttctcttgggcatggtggtggcagcgacggtggcaggatgtaggcgctggacgcgggatgcagtggcatgtgggctttgatcagtccgggggttgttctcacctcttcttcacactgctccaacttctttttttttttttttttgtctgtcgcccaggctggagtgcagtggcactatcttggcttactgcaacctccacctcccaggttcaagcgattctcctgcctcagcctcctgagtagctgggactacaggcgcccaccaccacgcccagctaatttttgtatttttagtagagatggggtttcaccatgttggccaggctggtctcgaactcctgacctcaggtgatctgcccaccttggcatgtgccacaatgccctgctaatttttgtattttcagtagaggcgggtttcaccatgttggccaggctggtctctaactcctgacctcaggtgatccacctgcctcggcctcccaaagtgttgggattacaggtgtgagccaccgtgcccagcctgtttgtttgttttcaatacagggttttgctttgctgcccaggctggagtacaatggcatgatcatggctcactgcagcctcaacttctgggctcaagcaatcctcccacctcagcctctcaagtagctgggactacaggcacacatcaccaggcccagataattttttgtagagatggggtctccctatattgcctaggctggtctcaaactcgcgggcttaagcaatcctcctcccacctcagcctcccaaactgctgggattacaggagtgagccaccatgcctggcccttacttaacctttgagcttcagtttccttgtctgtaaagtgagttgctatgatacttaatttaatagttcagttttaaataaaacaatttgtatgatgcattgagcatatcagcatattgcctgtcatcttcaaggcttggtaaacaaatatgagtaccctgtgttatgcagtatccaggctcctggcatgccgggatggggtagaagggttcctggggagggtttcatgggacagtcctaatgaatggagggagaaagcaatcctggcatctggcattgggtcctacagcaaccatgagtcagccccaggtgctaagggactagctatgttctcagcactgctgggtgtgtgctatgggtcacttggccacggtccttgacagtcacgctgcctgagcatcattcttgtaaatctggcctgagttctttttaaaaaacagcctccaccatgtgatgtcatggtccagccagggttggagaaggaaggaggaggagggtgtgtgcacacagtctggggatcttcctatttgtggaggaatcaatttggtcctagaagaaactctctatccttctctcctcctttccagacccagtaagaaattggtattctgatctgcagtgagaggaggtgataaatcataatggttaagacatgaactttagcatcaagatatcctgggtttaaatcctggctctgccaattactagctctgggattgtaaactttctcctcctgtttccccatttcacacatggagaagataattctgatgttatagtggtgtggctttaagacatacatgcaaagctttcagcacatgcgtcagtaggcacattatgcagcccatagtaagtgttcaatacatggtagtgactgttaggtccccagcagttgatgagtaatatgacttgatcagcttctctggaaggaccccgtcttctccaatggctttttttttttttccttcagacagagtttcactcttgttgcccaggctggagttcagtggcttaatctcggcacactgcaacctctgcctttcgggttcaagcgattttcctgcctcagcctcctaagtagctggattacaggcaggcaccaccacgcccagcaaatttttgtatttttagtagagatggggtttcaccatgttgttctggctggtctcgaactcctgacctcaggttatccacccaccttggcctcccaaagtgctgggatgacaggcatgagccaccgcaccaggcccagtgaccatttttccccctgaaaggtagtcaggcccctcccaggtgtgccatcattctggagatgaggaggctggggagagatggagtagttgtgtctccactcctttgtcttccctcccttagctggctccctggctatagctcctctagttctccctgctatctccctgccctctcaagaagtgtgtctcctctctctagttaggaaggatcagcccctgccagccaggacttctggcttccccgaccctgcctctttctcacatgttctcttgtgctctgctcttcattttgcagacagctgggggagagaccagcaggtgtgaatgactgtgcatcacagagatgcttattgcaggatgctccacatataatttcaaggtgtagaaggccctagcactttttacttcctcctgggtggctctgcatttgtgtgtgtggtggtggtggaagttgaagattagagatgccactcttcctaagggtcaagtcacctcttgccctgctccaggcaggatgacccttggcctgtaacaagaaaggaagtggcagtaggatggtagtaggatccctgctcatgaggaattaacctacactggggccagaagtctcaggacaatgttcagctggacaagaaccagatccctctctttccaagccctaggtggtgcggggtgggggcagaggaataaggaaatgtgtaagaaatgtaaaaactagatgtatggccgggggcggtagctcacgcctgtaatcccagcactttggaggccgaggcaggtggatcacctgaggtcaggagttcgagaccagcctgaccaacatggtgaaaccctgtctctactaaaaatacaaaaattagctgggcgtggtggtgggcgcctgtagtcccagctactcgggaggctgaggcaggagaatcgcttgaacccaggagacggaggttgcagtgagtcgagatagcaccattgcactccagcttgggcaacaagagcgaaactccatctcaaaaacaaacaaacaaccaaaaaaacaaacaaactagatttccaggccaggcccggtggctcacacctgtaattccagaattttgggaggccaaggtgggcagatcacttaaggtctggagtttgagacaagcctggccaacatggtgaaaccctgtctctagtaaaaatacaaaaattagctgggccttgtagggggcatctgtaatcccagctactgggaggctaaggcaggagaattgcttgaacctgggaggcggaggttgcagtgagctaagatcacaccactgcactccagcctgggcaacagagcaagactctgtctcaaaaataaataaataaaaaacaaacaaagaaaaccccctagatttcactggacataaggaaaaaaaagactaaaggcaatactacgtacagttaaaaagaaagaggcatacatacatatgtagtatcatggaaagatatccaagacatgttactaagtgttccctcctttccttcctttttccccttccccttccccttcccttcctttctttcttctttttctatttggagacaaggtctcactctgtagcccatgctggaatgcagtggcatgatcatggctcactgcagccttaaaattctgggctcaagggatcctcctgtctcagcctgctgtggagctgggactacaggcatgtgccaccaagcctggctaatttatttttattttttgtagagacagggtcttgccatgttgcccaggctggtcttgaactcctgacttcaagtgatcctcctgccttggtcttccaaagtgttgggtttacaggtgtgaggcactgtgcctggcttctttattatcattattattattttagacagagtctcgctatatcacccaggttagtctccaattcctgggctcaagttcctgcttcaggctcccgagtaactgggattacaggcatgagctgcatacccagcaatagtatcacattttttaaaagacactgaggccaggcacagtggctcacacctgtaatcccagcattttgggaggccaaggcaggtggatcccttgaggtcaggagttcaagacaagcctggccaacctggtgaaaccctgtctctactaaaatacaaaaattagctggatgtggcggcgtacacatgtaatcccagctgctcaggaggctgaggcagtagaatcacctgaacctgggaagcggaggttgcagtgagccaagatggcgccactgcactccagcctgggcaacagagcaagactccatctcaagaaaaaaaaaagtcactgaataataggagtatcaaatcccatttatgctttcctttaaaaaaatccagaatatgtgggaaatgagatatgagtggggatacaaagttttctgggttaaatattttgcaacaagtatatacttacatattacttgcaatttaaaaactgtattttttaatagcaaaagcagaaaggggcttagaaagggaatgtgagggccctcaggagtggaaaacaggggacttcccatgacgaaactagcttctgttcctaatacggcccttcctctacccattgctacagatcatcagatcgtgggactatctcctatggctacatggaaaagaaaggtgaggtctcctgtccctattcatctccaaagacccccaaagtaaaccctcagttacccggatgctctcagaggtcgataaaaacattcaaacatccaactggcatggaaaagtggaagaggaaaatcaaaacgagagaaaattcccagattctccaattagacagtttggacacctgagctcaggaatgactacaataagttctcctttggaggtctcaacatcatgatgcaaacttaaccccaaccctaggctaaaaataaaacttcccaagggccaggtgcagtggttcatgcctggaatcccaacactttaagagactgatgcaggaagattgcttgaagccaggagttcgagaccagcctcggcaaaaaagcaagacccccatatctacaaaaaatatgcctgctgtcctagctacttgggagactgaaccaggaggatctcttgagcctagaagctcaagactgcagcatgccatgattcttccaccgcactccaatgtgggcaacagagtgagcccctgttcctaaaaagtaaagtaagataaaaataaaataggaacttcctaccaagttacctatattttcttttttgatcttaaggccattttacatatgaaaatcttgagctccagagatgtgaaataacctgctcaagttacttgcagtaagacagaggcagaacctaccttcagaatcctcatcagtttttttctttcatccgttatgattatccattatcattatgccatattgtcctttttttttttttttgagatagggcacaatcacagctctctgcagcctcaacctctggggctcaagtgatcctcctgcctcagcctcccgagtagctgggactacaggtgcacaccactatgccaggctaattttttaaaaatttttttatagttttttttttgtagagacagggtttcactatgttgcccaggctctattttaaatctaacatttgcttttgtcccctttaatcttgaccccaaccccagtcctaacccatagtgggctcatgtgcttctggccccaacccagtgaaaatggcttgttttgctttctgcacctccttgctccttcctcccatcttatcactcagaaatctcccatgcttccttcttgaaaggagcaatcctaggcaggcaggaaggactagatttggtcccagcctgaaatgtctcagagactgcatggctcttttctgcatcattgtagaaatgatccttaccaggaggactttggagttcacgtcaagcaggccattgactctctcccactggattctttgcaaaagcagcctcttgaccatagaggaggacaacaggttatccgtgcccatgatccaagagcttgagatcctgagatgaagacttcaggagagatcaggacagataatttgtggtgggcaggaatcagtaaactgggacaacagcagcagctgagtccaagggtcagtgtctgggagtaatttaggaaagtttggtgctgacagctgtgtctgggacttgaacgtcatggccaaaccagctcctgggctcctcagctgcttcagactaatgaacctctggcccaggacacaagaagcagctgtggtgtggctgaagtcaggacccccggaggcccagactcagccttgctgcttccttaacagtgtgaccttagataagtcacttaggaaaagaggaaaggaaactagcatttagcgagtgcagtgccctttcacagctgccatcatacagtgaggaggggaatgtccctatttcacatgagaagtcctgaaggtaaacgtgtcattcaaggctctatagctggggagtaagaagacagaattagaacccagagcttctgaattcaaatcccgggctgttggccctgagctttagcttctcggtctgtaaaatggtgttacactcacctggcacatgaagtcgcacactgaaggttctaaaacccctccattctttctcccaaccgtggtcctgaagagctgtggcaccttcttcctgggaacgtagtcatcgtattttgccctccccacaacaggtttgtggggtctaggccccaggaggtgtctgaagggaaggtatttggactttgctttcccctctaccccactccccagaccttctcccgactccagagggctggctcccgcttctcctccctggttttggctggcggactgacatcagctggtattcctagggataggataaggaaccctgagctgcatggctcagctccaggcgccccttcccccacaacccaggacagccccttagaagcagcggcgtcgagaggccgctggagctcccagccccctccctcttctccacgtctgggagagcagcttgccgacccctccagacccgaaagagagagggggcgactcgaattcggggagcgatcctgggagaccctggagagtcctgggcgccacgcagccgagcccccgaaatagatcccggttccggggttccgggagctgtccagcctcgcggggtgagctacgagagggtgggccaacgccggcgaggcggagggagccgcgggcgccaggcgcgggtgaggcagcgactccccctccagccgcgggccccgagcgtcgcccccgccccccacgtggccgccgccgtcccagcccctccgaggaagcggcgcggcttcctgcagcttgggctggggatataggcgcccccacacccgggcccggctcagcgccgccgccgctcctcgcctccttgctgcacgatggcctcgctccgggtggagcgcgccggcggcccgcgtctccctaggacccgagtcgggcggccggcagcgctccgcctcctcctcctgctgggcggtgagcgcggcgccccgaggcccgggcgggaggcgcgagaggccccggaggggagaggggagaggggagaggggctggatggccgaggccggaacgggccctggggtgcgggttaggaccgacgtacctagcagcactggccctcggacggtccctgaccccacctcggggcgggcgcagcatgagctgcttcccacccagggaaagctggggtgctggccccggcccctcgaagagggcttaggaggacggaagctggccagagatgagggggctttgggcctgggtgtgagtgacaaggagctggtgccagcccctccctccccggcactgaggcgtccgtgggggctagattattcctccttttcttccaaggtagcctattttcggagggtctcagtcccccaacccccctcgcaggctccactgccggggtccccgctatgttaccctcctctcccgtttcttcccacagctgtcctgaatccccacgaggccctggctcagcctcttcccaccacaggcacaccagggtcagaaggtgggtacccagggtgtggaagggtggccgagggtaaggacgagagcaagttcagtggggagggttcctttcccacgaggcctgcccaaccccagctgatgccccactacactcccctctgttctttcttggggttcctcgtggtctttctccctgtcctcctacaaagcccctgcacggctctgagctgcccacctcacaagtgggcgagaagaccccaggaaaaggtgtacgtggaagttcttatcaggctgggatggaaagtgcttagcacatggaagtcattataggattcctgagctgggactctgtcctcagccagaatgttttgctagggaaactttctgaagggttcccacgtttgaagacaggcagttcaccttgcaagcacctgggcaggagggtttgtagggaggggtaggggtgtggtcattgtgtagcatctgtacctacaggggggacggtgaagaactatgagacagctgtccaattttgctggaatcattataaggatcaaatggatcctatcgaaaaggattggtgcgactgggccatgattagcaggtaggggcagtgatggagggtggctcaggccagggggtggacctgctcattgcaggtagaccctgagtgagagtggggcactcttctccctgggtccaccccctctctcactcaagtcctcttctgcccctaggccttatagcaccctgcgagattgcctggagcactttgcagagttgtttgacctgggcttccccaatcccttggcagagaggatcatctttgagactcaccagatccactttgccaactgctccctggtgcagcccaccttctctgaccccccagaggatgtactcctggccatgatcatagcccccatctgcctcatccccttcctcatcactcttgtagtatggaggagtaaagacagtgaggcccaggcctagggggccacgagcttctcaacaaccatgttactccacttccccacccccaccaggcctccctcctcccctcctactcccttttctcactctcatccccaccacagatccctggattgctgggaatggaagccaggtggggtcatggcacaagttctgtaatcttcaaaataaaactttttttttgtacaatgtccttctccccatttcagtggaacctgtgtccttccctgccactgccacaggccctcagccctgggtagtagaactggaaaaatctggatggcccattgttctgttcatttcacctgcccccctgctccctgcctccatgaaggtcacacccctatattctttcctcccaggcgggcctttcctgcctatatccaaactcggctccaggaaacaagcaggaagagactcccttccggtctggacagcagctgggggcctgcaactggggaggtgtgggggaaggggcaagggaggaatctctgcttgtgactcctgcaagaggagcaggaggctgcccaggagccctgactattcctcttcttcatgcttcagtttactcacagggcctgggaagaggaaccctgactgagcaacaggaatccattcctaaggccctcacaattgagggagaaagcagtgggggcttcctttactaggttcaccacccctctccatgtcccttgccctcatcctacattgtcctggactgggtgtggcctgcagcctagcaacacactgccccctggtgtccactaaagccagcaaccagaagacgtatctgatctggaagaagctcaaggctgaggagcactggaccctggggtcagaaaactgccatctctacagcaatcactagttccttgtttgtttgtttgtttgtttgtttgttgaaacaaggtctcattctgtcacccaggctggagttcagtggcacaaacatggctcactgcagcctcgacctcctgggctcaaggatcctcccatctcagacttccaagtagctgggaccacaggcgtgagccaccatgcccagctaattttttttttttttttttttttttgagatggagtcttgctccgtcacccaggctggagggcagtggcatgctctcggctaactgcaaactctgcctcctggttcatgccattctcctgcctcagcctccagagtagttgggactacaggtgctcgccaccacgcccggctaattttttgtatttttggtagagacagggtttcactgtgttatccaggatgatctcgatctcctgacctcatgatccacccacctcggcctcccaaagtgctgggattacaggcacgagccaccacacccggcctaattttttttttaagtttttttatacagatggggtctcaccgtgttgcccaggctagtcttgaactcctggcctcaagtgctcctccccagtcagtctcccaaagtgctgggattacaagcatgagcctgctgtgcctgcacaaccactagttcttagctggaccccgctatcagcttcctgagacaaacaacactctcttcagataccttcctactttctaggatcatacccagcccctctctacaagtcaccattgctgtatatgaacacacctatatgttccctggatagtgaggcccatttcttaccaggtaacctacaccttcaactctccatcagacacaactgccaggtctccaaaaatatctccaaaacaactttattctccatggatacatctgtttactccttgtggcaccccgagcctctttagggactttccttcttgttgaaatatctgccttcttgagtacatgcatgtccatttcttggggtatcctgccttttccatatatgcttgtatgattcctggaacatgcctattcattctctgagacacacatctctcagggtgcatctgtttttctaggcacacatatgttccctaaaaatattttgagttttctgaccgggcgcggtggctgacacctgtaatcccagcactttgggatgccaaggctggtggatcacctgaagtcaggaattcgagaccagcctaaccaatatggtgaaacccgtctctattaaaaatacaaaaattagccaggcgttggggtgtgtgtttgtagtcccactacttaggaggctgagataggagaattgcttgaacctgggaggcagaggttgcagtgggccaaagatcgctccattgcactccagcctgggtgacagagcgagattctgtctcaaaaaaaagtatatatattttgagttttcacctgaaatacaggtttccttaatttccatgaatgcatctgtcttccctaaaggtatatctactccctttgtagcatgtatttgccttcatgcattttattaatatacatcaaggacctgctggtataaaacactgtgtgtgccgggcacagtggctcacgcactcccagcactttgggagtgtaatcccagcactttgagaggctgaggcgggtagatcacaagatcaggagttcaagaccagcctgaccaagacagtgaaaccccatctctactaaaaatacaaaacttagccagttgcagtgacaggcgcctgtaatcccagctactcgggaggctgaggcaggagaattgcttgaacctgggtggcagacgttgtggtgagccaagatcacgccactgcactccagcctgggtgacagagtgagactccatctcaaaaacaaaacaaaacaaaacaaaaaagacactgtgtggtgtattatgttggaaagataggttagatagagtctggttttctgccctcagtggctttcatctagtgagaaagttgacgtgtacaaattaacaaaccaaaacaaaagtgtaatgagaatcatgctagggatacaaaccaaatgttatctgagtgtgagggaaaaagggatcacatctggctgagaagatcacaaggggtgtgatcacaggagggtgactgcagagttggtagatgactaggccatagctggagtacgttcttctaggggagagagtagaaagggaggtgaattaggaaattattgcaataatccagacctgagaaaatgaggacatggggcaaaggagtgttgaatggggtaatggaaaataattataaagtagaggataggattaaaaacgggaggaagaggccagatgtggtggctcatacctgtaatcccagcgctttgggagactgaggtgggaggatcacctgaggccaggagttcaagactagtcagggtagcatagtgagaccatgtctctacaaaaaaaaaaaaaaaacacaggcagggcgaggtggctcatgcctgtaatcccagcactttggaaggttgaggtgggtggatcacttgaggtcaggaatttgagaccaacatggcgaaacaccatctctttttttttttttttttttgagacacagcattgctctgtcgctcaggccaaagtacagtggtgcaattttggctcactgcaacctctgcctccctggttcaagcgattcctgtgactcagcctcccaagtagctagcactacaggcatgtgccaccatgcccagctaactgttatatttggagtagagacgggagatttcaccatgttgagttgaccaggctggtctcgaactcctgagcttaggtgatccacctgcctcggcctctcaaaatgctgggattacaggcgtgtgccactgcgcccagcccgaaactccatctctactgaaaatacaaaattaggccagatgcggtggctcacgcctgtagtcccagtacttcgggaggctgagatgggcagatcacctaagctcaggggttcgagaacagcctggccaacatagtgaaaccctatctctactaaaaatacaaaaactagctgggcgttgtggtgcatgcctgtaatctcagctactccggaggctaaggcaggagaatcgcttgaacctgggaggcagaggctgcagtgagctgagaacgcaacattacactccagcctgggcaacagagcgaaactctgtctcaaaaaaaaaaaaaaaaaaaaaaaaagctggcacagtggctcacgcctgtaatcccagcactactttgggaggccaaggtgggtggatccacgaggtaaggggattgagaccatcctggctaacacagtgaaaccccatctgtactaaaaatacaaaaaattagccgggtgtggtggcacgcgcctgtagtcccagctactcaggagactgaggcaggagaatcgcttgaacccaggaggcagaggttgcagttgcgccactgcactccaacctggcgacagagtgagaccccgtctaaaaaaaaaaaaaaaagctgggtatggtggcatgcacctgtagtcacagctactcaggaggctgaggcaggagaatcacttgaacctgggaggcggaggttgcaatgagccaagatcgtgccactgcactccagcctgggcaacagagtgagactctgtctcaaaaacaaacaaacaaacaaacaaacaaataagaactcagctggatgtagtggcacatgtctgtagttccagctacttgggaggctgagtggggaggatcagggattcaaggttatggtgaggtatgattgggccactgcactccaccactggcaaccctgtctctaaaaaaaataaaaaaaataccaacagacccttgatgtatattcatgaaatgcatgaaggcaaatacatgccatgaagggagtagatatatctttagggaaaacagatgcattcatggaaataaagcaaacctttatttcaggtgaaaactcaaaatatctttagggcatattgtccacttccccattcaacactcctttgctccatgtcctcattttctcaagcctagattattgcaataatttcctaattcacctccctttctactctctcccctagggaggaaattagcaggacttggataaaacaggagggagaggccagggctgagggagaggagaggttaggggtgactcaggctttggacttgagttactaggacaattatggcagtaataatagaaaagagccattgaggaggaagaactgtcctgaagaaaagaatgtacaattataaggtaacagtggaacaagctgttatgttccacagagagttagaaatggggggatgggagtggaaagaggttgggtctggaaatataggtgtgggagtctcctgcacggaagtgcgccgtaacgccattagatagatgagaactctaagacagaatggttcattgaaaagaggaaggctggccgggagcagtggctcgtgcctgtaatctcagcactttgggaagccaaggcgtgcgcagattacctgaggtcaggagttcaagaccagcctggccaacatgatgaaaccctgtctctaccacaaatacaaaaattagccaggcatgttggtgtgcgcctataatcccagtttctagagaggctgaggcaggagaattgcttgaacctgggaggcagaggttgcagtgagccaagatcatgccactgcactccagcctgggcaacagagcgagacttggtctcaaaaaaaaaaaaaagaaaaagaaaagaaaagaagaaggctgagttacactcttaggaaacatcacacttaaagaatgagaaaagggctgggtgcagtggtttatgcctataatcccagcactaggaggctgaggcaggaggattgattgagtttaggagttcgagaccagcctgggtaacatggcaaaaacccatctctacaaaaattttaaaagttagccgggtgtggtggtgcatgcctgtagtcccagctactcaaaaggctgagatgggaagatcgcttgagcctgggaggtcgggctacagtgaaccaagatcacaccactgcactctccagcctgggcaacagagtaagaccctgtctcaaaaaaacaaataaataggctgggcgtggtggggtcacgcctgtaatctcagcactttaagaggtcaaggcaggcggatcacgaggtcaggagattgagaccatcctggctaacacagtgaaaccccatctctactaaaaattcaaaaaattagccgggcgtggtggcgggcgcctgtagtctggagagctaatggagaggctgaggcaggagaatcgcttgaatccgggaggtggaggttgcagtgagccaagatcatgccactgcactccagcctgggcgacagagcaagtctccatctcaaaaataaataaacaaataagagggacagagggaagatcagagatgtaatagcagaacaagaataaaggagtgtcaaaggccagccatggtggctcacgtctgtaatcccagcactttgggaggccgaggcaggcggatcacctgaggtcaggagttcgagaccagcctggccaacatggtgataccctgtctctactaaaaaatacaaaaattagccaggcgtggtgcggtgcctgtaatctcagttactcaagaggctgtgacagggagaattgcttgaacccgggaggcagaggttacagtgagccaagatcacaccactgcactccagcctgggcgaaagagcgagactccacctcaaaaaaaaaaaaaaaaaaaaaaaaaaaaggctgggccggtggctcacgcctgtaatcccagcactttgggtggccaaggcaggcggatcacctgagattgggagtttgagaccagcctgaccaacatggagaaaccccgtctctactaaaaatataaaattagctgggtgtgatggcacatgcctgtaatcccagctactcgggaggttgaggcaggagaattgcttgaacccaggaggcggaggttgcagtgagctgagatcttgccattgcactccagcctgggcaatgagagcaaaactcaatctcaaaaaaaaggagtgccataaagtcaacggaaatagtgagctttgagaaggtattatcaactgaatggttcattcattcatccatttaacaaatatttgttggtcattctgtggactaagtacagtgcacagtgtttttacttatttttttttaatttctttttttttgagacggagtctcgctctgtcacccaggctggagtgcagtggcgcgattaagctccctgcaacctcagcctcctgtgttccagcaattctccagcctgagcctcccgagtagctgggattacaggcgtgcaccaccatgcctggctaattttttgtattttttgtagagacgaggtttcaccatgttggccaggctggtcttgaactcctgacctcaagtgatccgcccacctcggcctcccacagtgctgagattacaggcgtgagccactgcagctggccttttctttttttttcttttacccagaaactaaggtcacaggaactgtgcgcgtgaaggatttgggtgagggaaaggttggaaatcagacagaaaattgagatcagatgatgacaaggtcaaggtttgtacttatttatttatttatttatttgatacagagtctcgttctgtctcccaggctggagtgcagtggtgtgatctaggcactgcaacttctaccttttgggtttaagcaattcttgtgcctcagcctcctgtatagctgggattacaggcatgtgcaccaacacatccagctaatttttgtatttttagtaaagacagggtttcaccatgttgcccaggctgctctccaactcctgatctcaagtgatccgcccgcctcagcttcccaaagtgctgggattacaagtgtgagccaccacgcccagcctgtactttttttttttctttaagagaaagggtcttgctctgtcatccaggctggagtgcagtggtgcgatcataccacactgcagcctcaaactcctggggtcaaataatcctcctgtctcagcctcccaaagtgtagggactacaggcatgtgtcaccatgcctggctaatttttaaaattttttgtatagatggagtcttgctatgataccaagggatgtaaatatcattattattgggccaggtgcagtggctcacgcctgtaatcccagcactttgggaggccgaggcgggtggatcacgaggtcaggaattcgataccagcctggccaagatggtgaaactccatctctagtaaaaatacaaaaattagccaggtgtggtgacgcatgcctgtagtcccagctacttgggaggctgaggcagaattgcttgaacctgggaagcagtggttacggtgagccgagatcgcgccattgcactccagccttggtgacaagagcgaaactccgtctaaaaaatatatatatataattattatgattattttttgagatggagttttgctcttgtcgcccaggctggagtgcaatggcgcgatctcgcgtcaccgcaacctccgcctcccgggttcaagcgattctcctgcctctgcctcccaagtagctgggattacaggtgcccaccaccacgcccggctatttttttgtattttttagtagagacggggtttcaccatgctggccaggctgatcttgaacaactcctgacttcacgtgatccacctgcctcggcctcccaaagtgctgagattacaggcatgagccaccaagcctggccaagggtttacatatttttaattaaggaagacctgtgcatatttatagtatatgggagaggagctaagggcaagggcgagagggaagatgatagagaagtcctggaggaagttgaaaaggggaggcaagaacatatgccaaagggtgcaacacttcttctgagtccaaaaggaaggagtaggctggatgcggttggtaatcccagcactttgggaggccgaggtgggcggatcacttgaggtcaggagtttgagaccagcctgaccaacatggtgaaaccccgtctctactaaaaatacaaaaattagctgggtgtggtagctcatgcctgtaatcccagcttctagggaggctgaggcaggagaatcgcttgaaccagggaggcagaggttgcagtgagctgagatcaagccactgcactccaacccggcaacagtgcaagactccgtctcaaaaaaaaaaaaaaaaaaaaaaaaagaaggagtaaaagtggagagaaatttttgagcgatgaatcaagtatagagacagacagagggaaaacttaaagggttcacatgcatggcctcaatctcataaagcaggaatgaaaggcgttctgcagagagcagagacatggggacaggtggagtgccttgatgaatgtggaaaagtttgaatagttatcttgagggtgacggagtcaataaaagacaaaggatcacagagctgcccttagagcccggtagtgaggctagtcagggaatctagggcttggcaaacatgttctggttatttttcttccagcaatactccagagcccaggagtgaaaaaaagaggtgggggaaatggagcaacgatcattggtttgggaactgacctgtaggtaggtaggtaggtaaggggacagaattgagtagtttaggctgggtaaggagtctgataaaaccaaaaggggtcctaggtcttgagacaagaaaggcgaggtcatggcagaggtgagagatgggtggttgtggtcaaagcctgcagctctgaatcatggaagtagggctgtctctagtgattcaagctacaaagtgtgctcccatgggtgctgcaggagcctgaggaatggtgaagtcaaaggaaattggagggccgggttggtcacctgttatccctttgggaggctgaggtctggagatcgcttgagcccaggagtttgagaccaacctgggccaacatagtgagtgcccatctctagaaaatattagccgggttgctgggagcgttaactcactcctgtagtcccagcactttgggaggtcgaggcaggaggatcacttgagcccaggagtttggtgagacgcccatctgtaccaaaacaacaacaaaatgtatttaataactgggtgcggtggtgtgcacctgtagtcccagctactcaggaggctgaagccggacggtcgccagatctcaggaggtagaggctgcagtgagctgtgattgtgccactgtattccagcctgggcaacaaagggagacctttctcaaaaataaataaacagataaataaataaaaaattaaaaataaaacaaaggacattggaattgagcttgggtaattgtgagttgatcaaattaaatggcaattcacagaaatgttaatattaaaagaagcctagtatagaggaaacaaaggtaggctgggatctggagatctgggctttatttgccgttctacttcagcaacaaaaattcgccgctttggggaagacatgacctttctctggggttgaaccagaagacttcccaggactcttcctgctccaaaagatagggctttttaggataacagcgagggactgggtcatgacgaggactcctcctgccggtctctctctttccagaaaggcttccggaacctttctgcattgccttctgcccggacgtgcggaagcgaaggccggaagtccttagccggtagcttccgggtttcctgggctactacgatggcgatgagtttcgagtggccgtggcagtatcgcttcccacccttctttacgtgaggctcagaccccaagaagcaccgctgtgcctccctcccctcccccggaccctgggctcagccctgatgcttcatatggggagggggagaaaagacccgtcggccaacaccctcagtcccttactttcttcctgaaatgcgtcccgggcaagtgctgcctcccgccctctaattctgcgccccactcccttcacccggcaggttacaaccgaatgtggacactcggcagaagcagctggccgcctggtgctcgctggtcctgtccttctgccgcctgcacaaacagtccagcatgacggtgatggaagctcaggagagcccgctcttcaacaacgtcaagctacagcgtatcctccctcaggctcttccacagcccatacacatgcacttctgcgctttcacacatgcccagacgcccccccgcgccagcccccttttacccatggtaggcagattcccacccaaactggacttaaagagtgaaaatgtgtagctgacattttcccctggcaaatgcagtaccataccctcttgttcttggcagtgatgactgctcggatgtcattaaggtcttagaatttctgccctgaagccaagttccaagttttttaacctaaacccttttgactatttgtatcttccatccttttctgtgtgaggcccagacttgggtaactacctttaattattttctctgcccccctcctgccaggaagtaagggtcatttgtttttgctgcctgattcatccctaaaatatctgtggagaaaggctgaaggaaggcaacagacagagggtgaggaatgacagtacctttcattttctaaagcttctttctttcttttttttttttttttttggagacagggtcttcctctcttgctcaggctggaatgcagtggcacaatcacataaagctccttttaattggaagagtttctctttaccttcctcctttgaatatccaggaaatgccaattcatatcatgttgggaaattgcacacatatgtgtgtgggagaggaaggggcaggtgtttctcaacatgggactggctctgaaaatttttatcctacccaactcatgtgtatgccgttcccttaaccttaaaccaggaaagcttcctgtggagtcgatccagattgtattagaggaactgaggaagaaaggtgggttcagttccccagattccttatttttcttcctagttgggttttcctgagggcaaattaggataagtctttttccctttaataactttttctctctcctggcttgaaggccagagtcttctgtaaagtaggcagcccaattcccaagtcctttcttctttgtacacaaaattgaaatctctgtctgtgccctaaacctgaagagaagtggaagaaggatgagtgccttgtagataataatagtaaaataaatattgaatctttctttctgaaagctgagtctcttccactctgtcccaccttggtatttttttgcctctttgtttctttttagttcatgatactttttttttgggtggggagataaggtctcactctgtcatccaggctggagtgcagtggctcagtcctatctcactgcagcctcgactcccaggctcaagtgatcctcccatctcagcctcctgagtagttgagacctcaggcatgtgtcaccacacacctggctaattttttgtattttctatagagagaatttttttgtattttctgtagggtctcatcatgttgcccaggctagtttcgaactcctgggctcaagcagtcctcccgccttggcctcccaaagtgtaagccactgcgcgcctggttatgctttcataagtatctgttttacagggaacctcgagtggttggataagagcaagtccagcttcctgatcatgtggcggaggccagaagaatgggggaaactcatctatcagtgggtgagatcattattctgccaagtattcaacagtgacccatggaaaaggttaactatattagggcctagcagatagccggtgttcccagatccagactgagcaaaatggggagggggcagaaagaggaagtgtaggccttctagggaaacctctttaagtgactcaatgtctttggctgcatagaacctccctttctttgcctgtaggaggccgggggctatgtgaggccatatttggagaatgcagaactgggaaccctgagtgctattgttggctggagcctctggccacaggagataaatggggaaaggaagggaaaaaacctggggcccctcccccactgcactgttatgggactgtccacaacatgaatgagatattctgaatcagtgtgggtgtggggacagaatactcttccccctaaaccaccagtcccaaacattcccaaggaagagaagagggtaagaagcatcaacattctaaatataacaaatacacaccatccattcttgaacaggaaaacaaccagaatgagaggtcaaggtcactcctcagacacgtgaagacctgtggtttagtggttccaaatgagtgtgtacacatataaatatagcacttgtagggtttatggcttttaggccactctgcagaggcgacagtgagtcctggtttgggaataggtatcattcctggatcagaggggtggagctgatgaatttactgtctcccaggagattcttggttctaattcactcctcattttctgtattcacaggtttccaggagtggccagaacaactccgtctttaccctgtatgaactgactaatggggaagacacagaggatgagggtaatgcctttcccttcccactcatagttaattttttgttttgttttgttttgtttttccgatatggagtcttgctctgtcacccaggctggagtgcaatgttgcaatctcggctcactgcaacctccgcctcctaggttgaagcgattctcctgcctcagcttcctgagtagctgggattacaggtgtgcgccaccacgcctggctaattttttgtatttttagtagagatggggtttcaccatgttagccaggttgttcttaaactcctaacctcgtgatccgcctgccttggcctcccaaagtgctgggattagaggcgtgagccactgtgccccgcctgtttttttttttttttttttgagacagagtcactgtatcccaggctggagtgcagtggcgcagtctctgctcactgcaacctccgcctcctatgttcaagcgattctaagttcttaacccatgtccaaggattccataagccacctgaattcacatgcaaaaaatcccaaattttgtttttgtggatgcatgtgcatttttctagggatagattagatattacaagatttccaagggcatctatgacccatgaaaagttaagaatttcactttcagctgggcacagtggctcgtgcctgtaatcctagcactttgggaggctaaggtgggaggattgcttgaggtcaggagtttgagaccagcctgggcaacacagggagatcctgtctctacaaaaaatttaaaaatcagctgggcatggtgctgtgcaccagtagtctcagttactcagaaggcttaggtgggaggatcacttgagcccaggaggtcaaggctgcagtgagctatgatcacgccactgcactccagcctgggcaacagagcgagatgctatcttaaaaaataacaataggccgggtgcagtggctcacgcctgtaatcccagcactttgggaggccgaggcaggtgggtcacctgaggtcaggagttccagaccagcctggccaacatagtgaaaccccgtctctactaaaaatacaaaaattagccgggcatggtggtgcatgcttgtaatctgagctacttgggaggctgcagcaggaggatcgcttgaacccgaaggcagaggttgcagtaagccaagatcgcaccactgcactctagtctggatgacagagcgagactccgtctcagaaaataaaaataataacaataaaaaaaattataaataactttcttcattcagcatctgctatagatgccgaatgagaaacaagggcaggggattaagcttgaaatctcattccttgctgactcaggctctctttcaccctttattcttatagagggctcaagatctgtgggtgtcagctgaagagattaggccaacacccccagcccatttatatactttggtttctggccaggcaaggatttgtatagtgtttgatttttacatagcgtaaacactcttagttctttttctccgactccagattctgatcctctggatcaccacaagtttcgatcttagctgggataacagagggtgtctcccctttctgccaggccctggctgccctagcagagtttatagctcttggctgttccccctgctgccctgcaggtctctgcttgctactcccaccatcaccccatgatttcagcactgtagccttgcctagcccaccactcaggttgggcaaagttgtaggtttcctcagaaagcaagctccctgacttagctgagcccccacagggggtgaggtaagcaagcctgtcagggcttgcctgctgcctcccacatctccctgcagtatcttaccatatctccacatactcagctagccataggctccccaatttttttggttttttttttgagacaaagtcttgctctgtcccccaagctggagtgcagttgcacgatcttgacactgcaacctccacctcccgggttcaagtgattcttctgcctcagcctcctgagtagctgggattacaagtgaccaccaccatgcccagctaattttttgtaattttagtagagacagggtttctccatgttggccagggtggtctagaactcctgatctcaagtgaccctcccacctcagccttccaaagttctgggattacaggcgtgagccaccgcgcctggcctgtgctcccagctaaaagctagaaaaagggcagataatagtgctggagtttaacagtctcctggccaggggtactggctatattctttgtgttaggatagatcctctagggtcagtgtctagtgacaatggctccgatctccctaggcctgattttcacggcccctttgtggccctgaagcagatggtgtcattctcgtgcatcagacacaaatgctaggtgtgggggaggctgagtctgagaggagaaccaagaagggggaaataagcacaaactcatttcatgctgattcaggctttcttccaccccttactcctaaggagtgcctgggaagtgtggatggcagctgtagcagtatagatggcttatgcataccctgcctctgggaggtctcggcttccagccagagcactctcctcagaggccttgggcctcaggagctgattgtctctgcctatctctccctgttcagagttccacgggctggatgaagccactctactgcgggctctgcaggccctacagcaggagcacaaggccgagatcatcactgtcagcgatggccgaggcgtcaagttcttctagcagggacctgtctccctttacttcttacctcccacctttccagggctttcaaaaggagacagacccagtgtcccccaaagactggatctgtgactccaccagactcaaaaggactccagtcctgaaggctgggacctggggatgggtttctcacaccccatatgtctgtcccttggatagggtgaggctgaagcaccagggagaaaatatgtgcttcttctcgccctacctcctttcccatcctagactgtccttgagccagggtctgtaaacctgacactttatatgtgttcacacatgtaagtacatacacacatgcgcctgcagcacatgcttctgtctcctcctcctcccacccctttagctgctgttgcctcccttctcaggctggtgctggatccttcctaggggatgggggaagccctggctgcaggcagccttccaggcaatatgaagataggaggcccacgggcctggcagtgagaggtgtggccccacaccgatttatgatattaaaatctcaactcccactgcctgcctcttaaattactacagtactggaatggggatggggagggctgtgaagtgttgccacctgagtaaatcccagcctgggagaggggagagaaaagaaagcttatggcttttgtagaagaaaaggtcctccagggccctgtgggctccagtgagcctgtggttttacatctgctgggtgggctgtgtggaggagtgctgatggaacacagcttggggacagactgctttctctctgaattggagtcacttaagggctcccccttccctcaccatctccctcatggaagtcctgaactactctgaagcccctccctccacccatctggtctgggtggggtaactgtggccaaggggagctgaggggggtaagccggatgtggactttggtttattggagactggcaaacagaaggggaggaaggagagcccatatagcaaaaacagccactctggccagggttaggctgcggccaaggtggcctggaggggatggatgaccgggctctcggtttgggggagggacttatcctggggagtacacacccattccctatgcagaccagagggacaacaacgtcagacctttccactgacctctccgttcggcctggggctactccggacagttaggagggggtggtgctgccttatctggggtgtgcaggagggtggtagcctccccctaagtaatcccccactagggtccgggtgtcgttctctcctgccctcctccgcgcacaaacaggtttgctcactcttagtgcgggaggatgctccgcggtctcccactcagttctggcctcagagtgagactgcggccgggggctcgggaaagaaggggacgcggctgggcggggcggtgactaaggtgaggggctgctcgcgggatccgcaccgcgggagcagctcggaggggcggccctggggggcaagggcgggccgcggggcggcgacgggggcggggccaggccgagctgggggctggggccgcagccgctcagccggagcgcagcgcacccagcgagtccgtctgtcaggccgcctcctctccggccgtctgattttctacccttcggcgccctgctcttcctcatgttggcatccccggccacggagaccaccgtcctcatgtcccagactgaggccgacctggccctgcggcccccgcctcctcttggcaccgcggggcagccccgcctcgggccccctcctcgccgagcgcgccgcttctccgggaaggctgagccccggccgcgctcttctcgtctcagccgccgtagctcagtcgacttggggctgctgagctcttggtccctgccagcctcacccgctccggacccccccgatcctccggactccgctggtcctggccccgcgaggagcccaccgcctagctccaaagaaccccccgagggcacgtggaccgagggagcccctgtgaaggctgcggaagactccgcgcgtcccgagctcccggactctgcagtgggcccggggtccagggagccgctaagggtccctgaagctgtggccctagagcggcggcgggagcaggaagaaaaggaggacatggagacccaggctgtggcaacgtcccccgatggccgatacctcaagtttgacatcgagattggacgtggctccttcaagacggtgtatcgagggctagacaccgacaccacagtggaggtggcctggtgtgagctgcaggtgcggctgggagccccctcggtggcaccttgggatgggactctggaggtcttaggatgacagacagagggtgggggagacagcatcaagggaagcatgtatttttccagtcaaatgtctatagacacctctgctgtctttgccctgaatgatctggctgactctgggctgcagaaggagagattgaggcaggtggtgtctggtgactcccccatgggtatgaacattctcactttaaagtctccatactcaaccctgagaggtggaaaataggatgggaagttaggcaggggagccagttcaggtcagtttcctgctggtgggtacccgcaatcccttcctctcccctaagtcctgagatcctcagttatgaccctggtcctcttgatcccctcactcctcccgtcccccacctatttgcagaccaggaggctgggatgcgggaagccaggagctgggcaagggtcatctccaactccagaagatttagggcagttgtggcagaatagggccccctaaccccttctggagcagtcagacttctggacttctccacagctgcgaggagggggacatagggagctccagctctcgagtgagtccagttctgctcctcatcccactgcctacctgtgctctcccttcccagacctaaaggcactaagcccatgggctttagggggaccttcctcccattgctcccatgctacatatgggttaggagaacccagtcaacttggggcctgaagcttccgattcagatcaggggacagagcctaggggaagggtccctctccagccctggcacagggctcgccccttgcgcctgccagtgccgcgccccaggctctgggccaggccaggagaggcagccaaattggggggtgaggggagggagaggagccggggcgggacgactatgggggtgggcagcctcctggcgcctagtcctggatcttttctttccttctcagtacctccctccatatccctcccgccttccgtctggatctagcagttctgtttctggggccaacccccttgccggccccaattccctgcccgcagtatcctgctgcccgcctgctgcctgctcactgccagcccccgggtgccccctcccgccccatggccggcctgggcagccacaaaggcactattgagctcagggctctgggaccgggctgcataaaggtgcttgtgtccagcagggggtctagggggctgccccaggcccaggttgggtgtgtccttggatcagcttacgtgcgggactgttggagagttcagggtctgcagcccactgggcaagtaatcccattaaccccaccccatctgtgggctccaaccctcacctcttcccccaaccccactccaggtgtccctcttcctttctgtgggtgtcctgggcctgacatgacacccgtcccccatcccacagactcggaaactgtctagagctgagcggcagcgcttctcagaggaggtggagatgctcaaggggctgcagcaccccaacatcgtccgcttctatgattcgtggaagtcggtgctgaggggccaggtttgcatcgtgctggtcaccgaactcatgacctcgggcacgctcaagacgtgagctctgcgcatgagtgggtggggagagggaggctgggatgtgtgcccactgcttcctgaactcccaggctcctcaaactctctaatatccaggtgtaaaaccaggttcaccatctccctctcacccaacctttgtccctgcctcggtgagtggcaatgtccacccagcactccagtaaaatacttgggtgtctccccagactcctctttctccactctgccccctcatcagtctgtccccaagtctttccttaacctctccccacctggctttcactgcttcatccatgccaccacctcaatgccatctcgctgatctggagccctgcagcagcctcctaaagggccttcccaaactctgccaccctctaagcgatcctatcttcctgcagcctggagaatctttcccagttgaaaatctgaactgtcactcccctccttaaaaccccttcaaagtttctcatggccttggaataaagcccacacaggctcacctgttcacaaagtccttaggatacagcctcactttcagcctaagctccagacacaccaaattcctggcacctcctcccaccctgccttgtcactggctttttctgtgcctttgagcacggtgtcctgtctgcctgggaagtctccatcccttccccctttcacctttgagctcctactcatcattcaagatgcaacacaaaagtatttcctctccgaagctctccctcatgcttggggcagttagtcatcccttcctgcgctcccacagcaccttggccgaggccctatctatcaatttacttcccaacccgtttggtaacgtcatgtctatccaccatgccccctgactcagtttctccctggggccgggcagacataggctaggagaatgctggcagaagatgcggaggcggcagcagggtgcggcaggggggaacttcccagtggggggctccttcccggaggacgtgtccccccaccaggactctggctatgcgccctcccccaggtacctgaggcggttccgggagatgaagccgcgggtccttcagcgctggagccgccaaatcctgcggggacttcatttcctacactcccgggttcctcccatcctgcaccgggatctcaagtgcgacaatgtctttatcacgggacctactggctctgtcaaaatcggggacctgggcctggccacgctcaagcgcgcctcctttgccaagagtgtcatcggtgcgtctctccaggagggtccatgccattccttcctcccccacctcagaagagaacctggggactccctcccctcagcaagggccttcaaggtccacaaaactaccagacgacagggaagctgaggagacctatggcacccacctcaaccccactgtgggccggggtcacttgcactcgcagggttgcctggggctgcctagcccagtgggaaggacgaggccagagtgcccagcaatctgatccctgctgtggaccctacagggaccccggaattcatggcccccgagatgtacgaggaaaagtacgatgaggccgtggacgtgtacgcgttcggcatgtgcatgctggagatggccacctctgagtacccgtactccgagtgccagaatgccgcgcaaatctaccgcaaggtcacttcggtgagagggatggggctggcgggaaaggcaattccagggccacttccccttttcctgcgccggccagcccgcagtcaatgccctttgcctgcacgaaaacaggctagacacagagtcgccttggtgaacacagaaggatattgagtgcacacgcgcccccaccagtacacgctatttagaataataatatgtgtggtgctcccaagagttcacaaatgatttcgcatcccatctctcatccaatccttccagctgccctgtgaggtgagcggggcaaatgttccaccctgcgatttacagatgaacaaacagcgggagacttgttcaagatcacactgtaaatacttggggggggggcggggattaggatttgaaatcacatcttccagtagcagtcaggcttttgcaactgcacgcgcagctgcctaaggagggagtggagtaaggggtggggggtggtgtcaagccgagagctggggatcagaggacgggaggtgtcatgcaaccccttccccagggcagaaagccgaacagcttccacaaggtgaagatacccgaggtgaaggagatcattgaaggctgcatccgcacggataagaacgagaggtgggggtgaaagggcagagcgtgggtagaatagggccgcgggccgcggcgggctcggctcacccacgcgtcaccctcaggttcaccatccaggacctcctggcccacgccttcttccgcgaggagcgcggtgtgcacgtggaactagcggaggaggacgacggcgagaagccgggcctcaagctctggctgcgcatggaggacgcgcggcgcggggggcgcccacgggacaaccaggccatcgagttcctgttccagctgggccgggacgcggccgaggaggtggcacaggagatggtgagcggaggacagactgtgctgccactggacgtgtaaaggacattgactcgaggggacagtgcaacagggatggggcgcaggaggggtggcagcgatgggggcggggcacctcacccctctcaaaatctcctgcagcgtctccctacctctccagccctaacttacccgcacgcacacccagttttcctttacagagggagccctgggtcctccagcgtccctgctttacctccagctgatctgttcttcctgggatgcccttcttgccaattcatcttttccttctttcctccctccccatttttctttttctttttcttccaatatgatcagaaccatcgatttcgggaagccgtcccctttggagtcaaacttaaatgcttctttccacttcagcatgttctcggttacagcactccccactatcggtcctgtcttaaacctgaataagttcctatctttcttctccactagactataaactccctgagggcagagactgtgttttatcgattcttctatccctggcagtgcttggcacatagtaagagctcattaatagcctacatctgtacatggcttaaagcactttcacatgcatttgatctttgctacccatcctgcatagggggcagttttatctcaacttgttgatgaggaaatggaaattcagagaggttgaataccttgtccagggccccaagtaagtaagtggaagagctggattgaaactgaggtggttcagattttaaatcaggttacccttccccacctcctttactcattcagcaaagcttgcggctaaaaggaatgaggaggtgatgaatggaagctggtagaaggggagaggcataagatgcaagggcagaagcttgggggctggcttaggaagtcctgaagggagtatgggattctttttttgggagtaatggagtctcactctgtcacccaggctggagtgcagtggcgctatctcagctcattgcaacctccgcctcctgggttcaagcaattctcctgcctccgcctcctgtgtagctgggattacaggcaaaagccacaacgcccagctaatttttgtatttttagtaggaacggggtttcaccatgttggccaggctggtctcgaactcctgacctcaagtgacccactagtcttggcctcccaaattgctgggattacaggtgtgagccaccgtgcctggccgagtatgggattcttaatagagacatgacagttgcaagggtggagaccacctacggtaggtcaagaatctgagaatgtgttagaaatttagagcaggtctccatagcacggcccaacctgacctgagatcaaatcttgatccattgctgacaagggattcttggccttggcactgttgacatgtttgttttagggactgtcctgtgcattgtaggatgttgagaagaacccctggcttccgctcactagattcagtagcacctaccctccagttgtggcaactaaaaatgtctctagatagtgccaaacatctcttcttcccattggaaaccactgacttactgtataactatgaaccagctacttcattaatctctaaaaatcgaatggtaagatttatcccacaaggttgtttggaggatctagtgatgataatgtaaggagctgccagttaacagacatagtgggtaatcagtaagtgttggttttcttcctcccatatcctggagttcccaagaaggcgtcctgatggatctttgatagggggtcccaagctgtgttcctcatcccccaccccaattccaggtggctctgggcttggtctgtgaagccgattaccagccagtggcccgtgcagtacgtgaacgggttgctgccatccagcgaaagcgtgagaagctgcgtaaagcaagggaattggaggcactcccaccagagccaggacctccaccagcaactgtgcccatggcccccggtccccccagtgtcttcccccctgagcctgaggagccagaggcagaccagcaccagcccttccttttccgccacgccagctactcatctaccacttgtaagtcacccctgatcttgagacgtaggtcccagaacaccttggcctctgccccctacccagaagttcacccccacagcagtcacttaccctgccttccacctctagccatgaagctccctccaggaaggaactctcccacagctccaggcccctccttgcttaggcaggccccatcctctgccactattcccttttatttcccctttttttgatcctctccctccccaaccagcggattgcgagactgatggctacctcagctcctccggcttcctggatgcctcagaccctgcccttcagccccctgggggggtgccatccagcctggctgagtcccatctctgcctgccctcggtgagagggggtcgcatggggggctcccagccattccaagcctatgacctatctccctccttgtgaaacccaatctcatgatccagtcccatgtccctggaaatccaccattcttgccctcctcttccctaattccatctccctaatatcctcccagcatccttgacaccatctccctagatctcaacagttatcttcccctgacctcatgaacccttatcctgtttcaggcttttgccctatccattccacgttctggccctggaagtgacttttcccccggggacaggtatgttctggtacaagttggggtgccagggtgagacacctggggcactggggtcccagtgtctgctctgacagtcattctctctcctttctctttaacagctatgcctcagatgcagcttcaggccttagcgatgtgggagaagggatgggacaaatgaggagacccccagggaggaatctccggcgcagaccccgatcccggctgcgggtcactagtgtaaggatggagtacaggagatagagagtaacctacagggccaggagggaagtgtcagggggaggcgggggaggtcacccagaaaacgggagaagcagtgtatgactagtactcaagaggcggccagtctggtttctaataccagactttagaggtggggtctacttatctccaagtccattgtggctgctgtcacttggctggggtagggtggagacacagcatgatgaagagggcttgaccttctcccctctgctgactttgaatctgaaggtctcagaccagaatgacagagtggttgagtgccagctacagacccataacagcaagatggtgaccttccgatttgatctggatggggacagcccggaagagattgcagctgccatggtgagggggagagagatgaggacagagtgtttggatctggaacaagagtctccttcctgatgtccgctggggctgaaacccactgatccgacagcaagcatttttaaatctctggttgacacttagcacagtaacgctgaagatgtctcagcccttgttttgggggagatttctgtttatccagtgaggtttggcttctcagctggagcaatttgagactcacattgaccgggtacacacaagtgctacgtataagtgcctggtagatgtgcaatactgtggctgtaggtgaaggatggactgggcagcaggggcaatgagcttacccaggatcttggcaaatgggcaagaaaggctgtgaagggtggaaaggccatgaagggtgtccctgtgcagggacagcataagcaaaggcattccaagtagagagtgtcttggaatatggggctgggagggcttcatgaggaaaccactatcactggaagtaaagattcctataggagagttgtggggagtgaagccgggtaggtagagtgggcccagattgtagaatagacaatgttaagagttaggcagaggccaggcgtggtggctcacacctgtaatcccagcactttgggaggccgaggccgaggcaggcagatcacccgaggtcaggagttcaagaccagcttggccaacatggtgaaaccccgtctctactaaaaaatacaaaaattagctgggtgtggtggcgcatgcctgtagtcccagctacttgggaggctgaggcaggagaattgcttgaacccgggaggcggaggttgcagtgagccgagatcacaccattgcactccagcctgggcgacaagagtgagattctgtctaaaaataaataaataaataaataaataaataaataaataaataaatagagaggcagagcaggctaggtccagtggctcacacctgtaatcccagcactttgggtggatgaagtaggaggattgcttgagcccaggggttcaagaccaccctggtaatataatgagaccctatctctacaaaaaatttaaaaaattagccgtgtgtggcggcacatgcctgtcatcccaactacttgggaggctgaggtgggaggatcacttgagcctgggaggtcaaggctgcagtgagctttgatcacgccactgcactccagcctggaagacagagtgaactttgtctcaaaaaaaaacaaaaacaaaaaaacaaaaaggcacagtgtaacgtgacagtaggctttatgaaaatcatctgccatgggatgtggaagggggaagggaaaatacctgggaggtagacccaggaagccatctgtggacaaaggagagagtggcttatgggagggaagaggagaaagggtgaatctgagggttgtttcgggaaaataagttactctgtaatccagtaacctattgacgtagtagagaacatagtacatagtagatgctcaataaatatttgctgagttgatatgattgggagttagggagaagggatgtcaaggacaacttgtaggccaccaaaggagagtaggagagtaggccaccaaaggagagaggaaattagaaatgaaagaaggttttttttaaggaggtcatgatgagcttgagtgaagaagggacagccaagacaagaccctccatagccatggatatgggtcaggcagggctggagagatgtggatggaggagtagtcagtacagagttgagagtgaagggagatgagccggcaaagccagagacacagagggttgcagagtgtgtctcagcgcataccaccagttctggagtgggaagcgggagggtaggtcatcgaaggacacagagacaaagccagagacgtaggaggatgttagtcaaaactgagtgaggagagagtttcaaggaggtggcataggatgaatcctcaggcaagaccacactggcttttgttaggagatctttgtgggagaccagtttcagtggagtgggggtggtggatgccagcccatggggtgaaggagggaaaggaatgggagaaacaccaggcatcaggagccctctctaaagcatctcctccatcatgtcattcaccttgtgtccaggacaaagacacaatatcacctggcacacaaggctcatcaccttccgtcaaaccacttgactctttcagagtcttccatccagccacactggtttcaaaatgggcctctgaaaaggctgggtgccttcctgcctctgcctccacctccttaagggtctctcactcgtagagccttctgtattgggctttcaagtcccctctgatcctgcacagccaaagtgaccccaccccatgcacccagagtcctttgccctcttttctctccttacccagtccaccctccactcctctgcagcagaattctcctgagacttggatctgatctcttgatattcacccgaaattatttagtggctacttgtggttgtagagtaaggtccaaattccaaagcctttaaaattcacagcacattcagctacacttgagtcctcactattttaagaataggctgtgccgggcatggtggctcacgcctgtaatcccagcactttgggaggccgaggcaggcagatgacctgaggtcgggagttcaagaccagcctgaccaacatggagaaaccccgtctctactaaaaaatacaaaattagctgggcgtggtggcgcatgcctgtaatcccagctacttgggaggctgaggcaggagaatcacttgaacccaggaggtggaggttgcggtgagccacggtcataccattgcactccagcctgggcaacaagagcgaaactctgtctcaaaaaaaaaaaaagaagaaagaaagaaagattgaataggccgggcgcagtggctcacacttgtaatcccagcacttttgggaggctgaggcaggtagatcacttgaggtcaggagttcgagaccagcctggccaacatgaagccctgtctctactaaaaatataaaaattagctgggcatggtgccaggcagtcccagctactcaagaggctgatgcaggagaatctcttgaacccagaaggtgaggttgcagtgagccaagattgtgccactgcactccagcctgggtgatagagcaaggctcagtctcaaaaaaaaaaaaaaataataatgtaccatgcctttcatgcttcaaagctactacactgttctctctgcctagactgctcttctcttcctgatgaacagcctggaatagaggaaggggtcgctttcatgtaatacctaagttcaaacttcagctctgttatttactaatccaatgaacttaggcaagtttcttaactctgtaaacttcagttgcatgtaagtaaaatgcagatgatagtatttgttttgcaaagatgttctgatacgacacagtgtaatgtagaagtgtccacacatggtaggtcctcaatagagattgcttttctcatctgtcaatgttcagctccaaagacttactctgtgaaactgctccagcttccccctatccccagggtggtattctgtctttggaatagcattttaaaaaattgtgattaaaaaaccataaatataaaatttaccaccgtaaccatttttaagtgtacagttcagcaatattaagtatattcacattgctgtgaaacagatctccaggggttttcttaccttgcaaatctgaaactctgtacccattaaacaactctgcctctccacacccccatccccccaaccctggaacaacatttctatctatatctcacttgtaagtgccttacgtattacgggctgccttgcagtaagtttaattacgtatttatgtgtctcctccactaagttttgggcttcgttaagcctaggaccttgtttcatgcttccttgtattcccacagtacccagcacaatgccagcacatagtaggtgctcaataagtattcatggatttgaatgtgacatttgccatttattgccttattctgacttaaccgtgtgggatgggtgtatgtgggcctgtgtgttatactttataaacactatggggcagaaattgtgtccaaaacatgggaggcagcagtgaagataactcaggctctggctttaggtagatgtgggtttaaatcctgtgaccttaggcagacggaacttaacctctttgagcattggttatcttaattctaccatagcaatattaatgtgggccccagaaagttactggtggtgttaaatgtgataatatacgcaaagcagctggtatatatacgcatcctatgaatgttagcacctttccttctaggctgtatttctccttacaccacacagtgcctggaacacaataggtatttacttgttttaggttggtggttggcaggagcagtagtgtgaagggtggattttttatttttatttttttgagacggagtctcgctcagtcgtccaggctggagtgcggtggtgtgatcttggctccaccgtttcccaggttcaagtgattctcccgtcttagcctcccaagtagctgggattacaggtgcccgccatcatgcccagctaatttttgtattttagtagagatagggtatcaccatgttggccaggctggtcttaaactcctgacttcaggtgatccgcccgcctcggcctcccaaagtgctaggattacaggcgtgagccaccgcgcccagcctgatgttttaagatcagaagcagggggagagggatgagtgagataacaagctctccctccccatcctgttgaccctcgcaaggtatataacgagttcattctgccttcggagcgagatggatttctcagacggattcgggagattatccagcgagtggagaccctgttgaagagagacactggccccatggaggctgctgaagacaccctaagcccccaggtcagaccccttggtggacacttccaggggaaatggactctctgctccagggtttattactctctgccctcagcggtccccttggatttaactcctcttcatctctgggaccctaaaacagtggcgcttttttttttttttgagatggagtctcactctgtcgcccaggctggagtgcagtggcacgatctcggctcactgcaagctccgcctcccgggttcacgccattctcctgtcccagcctcccgagtagctgggactacaggcgctcgccaccacacccggctaattttttttgtatttttagtagagacagggtttcaccgtgttagccaggctggtctcgatctcctgacctcgtgatccgccctcctcggcctcccaaagtgctgggattacaggtgtgagccaccgtgcctggcctaaaacagtggctcttagcccatttgagaatatgatgaaagccatggactcttgttctagaaaacttgttcaatacatacttttcttttaactcattattttgaaataatttcagacttgtggagagaagttgcaagaattatataaagaaccactggataccctttgcccagatttgccacttgttagtgttttgccaccttagcgtcatcattgtctcttcctctcccctctgtatgtgtgcatacataatatatttttcggaaccacttaagagtaagttgcagacatcatgcccttttacctctatacatttcagcacatatgcttctgaatcccttgaaactcatgtacagactcctataggttcatgggtcctagcttaggaaccccggtctgacaccttccatctcagactgctcttccccactgtgactgcggactcctttttctgcctcaggaggagccagcaccattacctgccctgcccgtccccctcccagacccatccaatggtatgtactgagttgtgtccttgctcatcccaacccctggggttgctcctgggaagggcatagggcatgtgggactgtggtctcaacataccctccttcccagaagagctccagagcagcacctccctggagcacaggagctggacagccttctccacctcctcatcttctcctggaactcctttgtctcctggaaacccattttcccctggaacccccatttccccaggtcccatcttccccatcacttctcccccatgtcatcccagcccctccccattctcccccatttcttcccaggtctcctcaaatccctctccacaccccaccagctctccacttccattctcctccagcacacccgagtttccggtcccactctctcagtgtccctggagttctctccccacgacttctccacctacgttctctcccacttgttctcaggtcactcttagttcccctttctttcctccgtgcccctccacttcttccttcccctccaccacagcagcccctctcctttctctggctagtgccttctcactggctgtgatgactgtggcccagtccctgctgtccccctcacctgggctcctttcccagtctcctccagcccctcctagtcccctccctagcctgccccttccccctcccgttgctcctggtggccaggaaagcccttcaccccacacagctgaggtggagagtgaggtgagtagaaaaccaagagggatgattagggagactccactctgcactcttcccttctcatggccccccactttctaggcctcaccacctcctgctcggcccctcccaggggaagccaggctggcgcccatctctgaaggtaaggcctctgaccactgaccttcccctgccattatccctactcactgtctgtcctgtcactgctctcctttcctcatgccttcttcctcgtcgccctacagagggaaagccgcagcttgttgggcgtttccaagtgacttcatccaaggaaccggctgagcctcttcccttgcagccaacatcccccactctctctggttctccaaaaccttcaacccctcagctcacttcagagagctcagatacagaggacagtgctggaggcgggccagagaccagggaagctctggctgagagcgaccgtgcagctgagggtctgggggctggagttgaggaggaaggagatgatgggaaggaaccccaagttgggggcagcccccaacccctgagccatcccagcccagtgtggatgaactactcctacagcagcctgtgtttgagcagcgaggagtcagaaagcagtggggaagatgaggagttctgggctgagctgcagagtcttcggcagaagtgagtctcgggaggatggaggagtgagaggagaacctgggagagcaaggtgtgtggctagccctttcatgccctccgtgcatcctcaggcacttgtcagaggtggaaacactacagacactacagaaaaaagaaattgaagatttgtacagccggctggggaagcagcccccaccgggtattgtggccccagctgctatgctgtccagccgccagcgccgcctctccaagggcagcttccccacctcccgccgcaacagcctacagcgctctgagcccccaggccctggtgagactgcagtcacccagcttccatcttttccctgagacccctttctgtcgactgtttttctccaggccctgggggtctgccccgggggaatagaccccctctccccacctcccctttcctcacttagtgctctccttcccccatcctgctcccaggcatcatgcgaaggaactctctgagtggcagcagcaccggctcccaggagcagcgggcaagcaagggggtgacattcgccggggatgttggcaggatggtgagggcgggcccaagggagggagagcccagggaatggtacctggctgcagcttcgccttcctcccaccttggaggtttcttcatcactttttcttttccctccagtgaattcagaacagaagccatgtatctcccccacaccagggcccaccatggagcttgtgttctcagaatctgatgctttctgatcaacaaaactgagcaaggaagatcccaacactgaaggggtagaaggccaggggggcatggagagtgcagctccattatagtgaagagccaaacatatgtgaactgtttgctgtgtggaggtgttagttctgctgcctaccatcttcatctctagcacctcccctgccaagagtcaaccactaagcaatcccacccaagcctggatgcttctagaggggcccactcccagctgggagagtgtaggggatatgctcacaccacattagcagcaaccaataaaaatgctggaaacaagaacgccgtgaatccatatgccatgccttaggaattgggggagcaaagacttgtggggtgaggcaggggaggatttaaaagggactttcttttcacaatgggaggcaggggtggaagctgcccagccctctggcttcctgccatcagttaatgaggaaactgcaaggtcagtgatccacttgactaagttaggatcccctccagaccccaccctagacctgtataggcaggtaccagggaaagttaaaagaatgaagactgcttgtctttcacccttcatccacctctctctccctccctctctctggggatgggaaaagcagtagagttacagtatgttcttgtgggtagaggacagaagagtgaccttccttcccctaagacgtgggttcagtctcaaactgcccagtgatctctcccttaaatcaggtggaaagatctcatggaaaaagtaattctagttaaacatttacagctccctggggcaatgccaccactgcagctactgcttgtgaagctttccagcatgaagtgccatatgctgcctctcagcctccatactcacttgactccaggagaatgactcagtttattattctcaatttgaccctatgtatcccactgtaggctcaaacactgcacagagctgccacgtctaacctcgtaacaactgcgtccctggaaggtgaagggggtaaaccacaaagtcagaaactttgggaaaagccacggtcgcatgcacacctctcaaacaaggaaacaaactacaagaaagggctcagtcattgtacacagcaagtgtgcagtgggcaaagttctgttcttttgacattggccaaatgcgtaagtccctggtttcttgggctcaatcacggtccaaggttagtaagaaggccaacaatgttgtgagcaggattcaatttctacagggtcatggggcatcatccaccatgtgaaggggctccagcaggttggacatgatcaatacccatccagattaggaccctgacgcccttgccagagctcgggctcgggcagctttggcctcgtcttctagctcatctaggaaacgctcctgggaaatcgagtagaaggtgtaaccatctggggaggtaggttcaggaaaccacacagaatatgcacattcccctttcctagatttgctctaccactcttgttactctcccaaatcagtgattccggcttcccgccgctgctgtttctaaaccctgaaccccaattccgttattattaataaatcaaattaaaagagtaccttaggaataacaaaggaaagtactacccattttaccccaaaattaaacgggtggttcagccctcttgcacactctgttcccctgcccctatatgcggtccccttgagtctacaacacggacggatacaaatagccaacaccagggccccgatgcctaggccggtcacgatgttccgggttcgccgccgtggtaggaccttctgccactgggcaagctccgcctgccgcatggaatgcagttgctcgggtgtcagcttctcccgagtcgggtcgatacgctgagcgaacggggcctctccacgcttagaatccagagggtcaccagctcccgaagacgccatgttgccactcctcccttcgcggtgccgccgcgcgggcctcgctgggaacagtagcccttggccgctgcagtggactctgggagttgtagtccgcgtgccctttgcggggcagagccgcggttcccgggcacaggggatggacgcgggaggtgagaagcggacgtgctttctgattggctgaggagtccgtggccgttggggcgggaaaaagctgtggagggttcgaggctgtggtggtaattgggttttcctcagacttgaggcgacgacacactcattggaaggggacgaggaatccagggtgtggcagaagactggagaggagctaagggggtcggtatgtggatccagtgaacccgtccaggtgccccaagaggctcgtgaatatggacggacccatgaggccacgatcggcctccctcgttgactttcagtttggagttgtcgccacagagacgattgaagacgccctgcttcacttggcccagcagaatgagcaagcagtgagggaggcttcggggcggctgggccgcttcagggagccccagatcgtgggtgcggctgcagggccggggtgctgggttcttgggagactggggcttgtgtctttcaggcaccgaccttgagattccgttgattttattcattcagagaatgtttgctaacacctctctgtggggtgctggggatatagtgatggataagtcacaacagtgccctccccttgatttcttcgacatgtatggaatacttgagtggcaccgcttggctagaaagatgaaatagagggccaggcatggtggcttacacctgtaatcccagcactttgggaggctgaggtgggaggttcacctgaggtcaggagttcgagaccagcctgaccaacatggtgaaatcctgtctctactaaaagtacaaaaattagccaggactggtggcgcgcacctctaatcccagctactcgggaggttgagacaggagaactgtttgaacccaggaggcggaagttgcagtgagccgaaatcgtgccattgcacttcagcctagacgacaagaatgaaactccgtctcaaaaaaaaaaaaaaaaaaaaaaaaaaaaaaaggctgggcgcggtggctcacgcctgtaatcccagcattttgggaggctgaggcgggcagatcacgaggtcaggagatcgagaccatcctggctaacatggtgaaaccccgtctctactaaaaatacaaaaaaaagccgggtgtggtggcgggcgcctgtagtcccagctactccggaggctgagggaggagaatggcatgaacccgggaggcggagcttgcagtgagctgagatggcgccactacactccagcctgagtgacgggtgacagagcgagactctgtctaaaaaaaaaaaaaaaaaaaaagagaaaagaaagatgaaatagagatagaggtcttgccttcaaaccatgtgcaatttgggggagatattagaacaaatatgcaatgactaggtactatggttagataagagacgtcagagagaaataaaacaagcgtttatgggggttgagaggagcgatggggtaataggaagaattcaggggatggcccaggcatcgggacatttcaggcagaccttgaaggaaggaggacattgggttggtgaagggggaggaaggagacagtgtttctaccaaaaagaggtagcatgagtaaagctatggaaatggggtgcttagggtgcatgtgggtacagtgtagtccatgttggccagtgcatgtggaagaatagttgaaattaatactggaaaggtagtttggagacattccatgtggaagtttgaatgccaaggggaagagtttatccttggtttggtaggaaaccaagaagacattgaaggtttttaaataagggagtgaaggttttaaaataagggatacgatggtaaccctgccttagtaaacattattttggcagtgatgtaaaggaggtaaaggatggattaaaccagagggagatgggatgtaggcagacaggtagagtcaatgtcagtaggctaggtgatagggcagagggaataacaagggagggtggattaaaaacattctagaggcaaagtctagggttctgctgtggataaatttaggaagtgaaggaggaaaacgtgactatgctaaacggttgagcctggaagactggaagtatagtggtcattaaaagaaacacacagacacggccgggcacggtggctcacgcctgtattcccaacactttgagaggctgaggcgggtggatcacgaggtcaggggttcgagaccagcctggccaacatagtgaaaccctgtctctattaaaaacacaaaaattagctgggcatggtggcaggcacctgtagtcccagctactcgggaggccgaggcaggggaatggcttgaacctgggaggcggaggttgcagtgagccaagattgtgccactgcgctccagcctaggccacagagcaagactctgtctcccaaaaaaaaaaaaaacaacaacaaaaaaaaacaacacaaaaaacacagacacactacataaataaagcaggaggaaaagtgacttttgtttgggaaagataataatggctttggagcctggccaacatggtgaaaccccatctctactaaaaatacaaaaattagccaggcatggtggcaggtacctgtaatcccagctacttgggaggctgaggcaggagaatggctggaacccgggaggcagaggttgcagtgagccaagatcacgccattgcattccagcctgggtaacagagtgagaccttgtctcaaaaaaaaaaaaaaaatatatatatatatatatatatatatatatatatataatatatgtgtgtgtgtgtgtgtgtgtgtgtgtgtgtataatagctttagttttggatctgctgagtttaaggtgtttgcagaacatctaaaagaagtgttcttgtagactattcaaagagtaggttagaagagaggtcagaaatggagatcaaggttttcaagttatcttcacaatgatattgttgaaactgtggcagaggataagctcctagaaggagaaaagaaaagcaggtcaaggacagttccttgggaaaacactttgtgttcagggaattggagtaagaagacttgtgaaggaaataaaaggaggagataggaacagaaccaagggacttttggcagccaagaggagactttgaaaaggataatggtcagaagtttcagatgctttagggatatcaacagaactaaagattgcaaaaagccatgatatttaacaatttggacatatttactgtcctctgagaatcatttcagcaagttaggaaaggtagaagccaacagatagaaaattaggaagtgaacgatgaagtggaagcagtgggtgtgtaagccaggctttcaagtaattcaacagcgaggctgagatgggaggattgcttgagcccaggagtttgagaccagcctgggcaacataggacaatcccgtctatttattatttatttatttatttatttaaaaaaaaattcaacagtgatgggaaagagagaggttaaaaggggagggtcttttagttaatagcagatctgagtatgcttgttatcgaggaggtggggccaatagcaagggaaaggtgtaaccctcatccattccacctaatccaagctcagtttttttggcaaattaaaatggaaaacagaaacaaatgctcagataattcagagcaaaaccaaaccaaaacttaacaactgcacacatacacaaagaacaaaactaagaaataaagcctaaagtccagcaaataaaatgactaataagagacacaattatatgttctagggtattatgctgaattgcttaaactaattctgtcctgcattggacattgctagccaaactgtagcctctgtaacgatgaggttttgtacatctatctatgtgtaatgtgtgttgagtagattgttacttgtgtaagcttgactaaattttctaagaaagttaagttttctctgaagacatatgattatttgactaaatgtgtaattctctacggatcaatgctaaaaggtcttcagtctgtaggagctttctttgttgagaactgacatttacccttgtttccaccctctaatgatattgcaagataaatataattctatctggagctgttctttcaaagagaaacagaggcaggctaaaatcttgccaaggtatctcacccttcccaccttcccaatgactccctccccctaaattgggctatgttctccaatttaggggatgtttcttcaaaacaagccacttcacagtaacacacttgctcctggggagaggctcagccaccacagatttacccagcaaactggtggtggagagatggtgtccagctgtaaggtgacttgtgtttgtaaagcaatgggagttctccagagggtggttactaaacaaacagtgtcataaagaatatcaaagctccaggagggatctttctgttcctgccaacattccacagaaaacagaatataggagttagggtttttatccatccaagaatcttccttgaagctgggggttcccagcatggtgtagaggtcacatagaccagctggtatgtttgtgtgtaactggccaagccttttatcagctgaaacccacaggaaggctcaagggtcactgagggggcttggtaagcccttgtctttggcactcagtcagcctcctttacatgtctctgatctgcctattggcagcaaaagaaactaagctcagctttggttgttttagtctcatctttctcacctcctgaccctcttcccttggccccatcacggcttttacacaatgccaagagttcacagagtggttttggttgcatcttgtgaattaggctcttttttcctgttttggcagagtttgtttttctcctgtctgaacaatggtgtctggagaaatctgtgagctaccaggctgtagaaatcctagaaaggtaaagccctggcataatgccttttgaacggcacctctcagagtggctaatgtacctacatctttaagaaagtatgagtagttgccccttaccctgagacctggttttacaccctctctaacttgcaaatataaatttctttgttgttattgttgttttgagacagggtcttgctctgtcacccaggctggagtgcctggtgggatcttggctcactgcagccttgacctcctgggctcaagtgatcctcccacctcagcttcctgagtagctgggactacaagcatgtgcctccacacttcgcacttggctatttttttttttttagagatgggcttttgccatgttgcccagggtggtcttgaactcctgggctcaagtcatctgcctgccttggcctcccaaagtgctgggattacaggtgtgagccaccatgctcagcctcaaatgtaaatttcttaaccagcaagttaaactccctttagtttgtgtgagtgaggattgtttactctccctcccttccctacaggtttatggtaaaacaggcagagaacatctgcaggcaagccacaatccagccaagagataataagagagagtctcagaattggagggctctgaaacagcagcttgtcaacaagtttactctccgtcttgtgtcatgtgttcagctggccagcaaactttccttccgaaacaaagtaaggagctggggttgctcatgggcacctgagtgttaggaagaaaccagcttttatacaaaggggggctgtgatgagcttcaagtcagtgacaagaagaaaataaataaattacaaagtaaaaacaacggccgggcgcggtggctcatgcctgtaatcccagcactttgggaggccgaggcaggtggatcacctgagatcaggagttcaagaccagccttgccaacatggtaaaaccctgtctctactaaaaatacaaaaattagccaggtgtggtggcgcacacctgtaattccagctcctcaggaggctgaggcaggagaattgcttgaacctgggaggcggaggttgcagtgagctgaggtcgtgccattgtactccagcctgggcgacagagcgactctgtctcaaaaaaactaacaacaaaaaaacaaggtagctgtaagaaacctactcctaggttaggtgatacaactcatggaaattccagagtgtaattatgcttcctaagcataccttctacacacacacacgcacacacatgatctttctccccctctcactcacacagaggcagttattaaatagcctgaagttctgttcccaaagtataattgggacagatgccatcattcatactggtcacctttcctccccccttggactcaagggcagtttacataaggtgcctgaattgccagcatacctatcaacagtagaagcaaactattacatttataagggaaaaaaatgtttccacatcactacccaatgcctatacagtaaaatatcattcattcaacaaatactttctgagtttattctatggccagatgctgcaccaggtgccatggctacaacagtacaaatattgtctgtgctcacaaggaacctattatgtaatgggaaaagacacatacaaatagtgtggaaaaaaaagctctgattaatgtaaatacagagggctataaatgtacctcatcagccttggagagtcaaggaagtgtatttagagaaaatgacttcttgaaatggggtgggtgggagatgggaggatcctaagagaagagggagaggaattagggaggaaaggaagggagatccaggtatagaaaacagcctgtgtagtggcttggagagggacagcatggtgggtttgggaactgtaagcaatttggaatgacaagcagagtgtgagggggaattaccaagagacaagactgaagatgaaggaataggctggattatgaagggctttgtgcactctgtcaagacgtatgaactttatcctaacattcttctttccctctcttttctttgctcagataatcagcaacattacagtcttgaatttcctccaggctctaggctatctacacactaaagaagaactgctggaatcagagcttgatgttttgaagtccttgaacttccgaattaatctgcccactcccctggcatatgtggagacgctcctagaggttttaggtatcttactgtgttagggaatatgggttggagacttccatagaaggcaatacaaaatgtgcatgggggggcatggctcatgcctgtaatcccagcactttgggaggctgaggtaggtggatcacttgaggccaggagttcaagaccagcctgggcaacatagtgagaccccatctctactaaaaatacaaaaattagctgggtgtggtggtgggcacctgtaatcccagctacttggaaggctgaggcacaagaattgcttgaacctggaaggtgtaggttgcagtgagccgagatcatgccactgcactccagcctgagcaacagagcggactccttctcaaaaaaaaaaaaaaatgtgcacaggggtttgggaacagtgggcagaacctgccaatgaggaacagtaggaagcttgatggtgtctctggatgactgaaacaggtgttccctccggcacttgtcagggaaagctcagaggtcttagcaactggcttctgtttggactcactaggcactcttattgcaggatcaaagaggtgactttatagagaggcataagataagagagggacaactacatgctaattgtatgtatactacagatggaggtttctctacctctacctttgtcctttaaaactgatctccagctaaacaggtttcttgtagtagaacatagcaaccaggaagcacattagcacctcaacagctttatgtcacaactgtggttatgatcagagaagacatgatcataaattctccctatcattcccatactccatctaggatacaatggctgtttggttccagccatgaggctgcatgcaacctgcctgacactgctcgacctggtctatcttctgcatgaacccatatatgagagcctgttgagggcttcaattgagaactccactcccagtcagctgcaagggtaagacaactcctatagggtaggctccttccaggaacagggaaggggagacagaccacaagaacttggggaatggaattagcctagcatggcatccagtcccagataacctactcaggctacctggttctcattagttccaatatgttgtttggatgcaggtgactgagcctggtcaggaaaaccctaaaggcttttacttttaaatttaaattactttaattaatatatttcctttcctagtttttcctttatagctgcataaaactcaaggttactggactgctttggtcagtcatttagaaaaaaaaacagtcgccggcgcggtggctcatgcctgtaataccagcacttcaggaggctgaggcgggcagatcacgaggtcaggagatcgagaccatcctggctaacagcgtgaaaccacgtttccactaaaaatacaaaaaattagccgggcgtggtggcgggcacctgtagtcccagctacttgggaggctgaggcaggagaatggcgtgaacccaggaggcggagcttgcagtgagctgagatggcgccactgcactccagcctgggcaacagagagagactccgtctcagaaaaagaaaaaagaaaaaaaaaacagtcacaaggttgcaacttggacaagagtgtttgattactgtaaagtcagactggttaaaagcctcacagttacaattgttagggaaacagatagaactaaaaaaggcctataaaccattcaagacataaggctcatgttaatcccagttaagttgggggagaatgggagagcaggtcaatgagctattacttgaccatttccttccatgtctaaaaaatccaagatgatcgacacaaataattcatagttgaagttccatgaccctatgatttggaagatcaagttccattctagctttaaaattaatgtggttttaatcactcagggaaaagtttacttcagtgaaggaagacttcatgctgttggcagtaggaatcattgcagcaagtgctttcatccaaaaccatgagtgttggagccaggtatgcaccactgagcaggaccagcatggtgagaattcatttaacagaaagcatttcacccatcagttaaaggaaaacagaggacaacctacagaagtgccaagacccaggattaggatgggtgtgcaagatttgagagggaaaaatctaggatagggctgaaatgtttccttgttttccttttataaaactggaaatggaggcccaagttcggcttgttcatttccctttataacgataacctgctattatgttaaactccaggctgggcacggtggctcatgcctgtaatcccaggattttgggaggccaaggcaggagaactgtttgagcccaggagttcaagaccagcctggtcaacacagcaagaccttgtctctacaaaaattaaaaattagtcatggctgggcgcagtggctcacacctgtaatcccagcactttaggaggccgaggtgggtggactgcctgagctcaggagttggagaccagcctgggcaacatggaaaagacctgtctctaccaaaaattttaaaaaattagctgggtgtggtggcacatgcctgtggtcccagctacccaggaggccaaggtagaaggatcccttgagcctgggaggtagaggttgcagtgagccaagatttcaccactgtactccaacctgggagacagagtgagaccccatctcattaaaaaaaaaaaaaaaaaaaaaaaattagccgggcatggtggtgcatgtctgcagtcccacaactatgtggactacttggctgagatgggaggatcacttgagcccaggagttggaggctgcagtgagccatgattgcgccactgtactctagcctgggcgacagagtgaaaccctgtctcaaacaaacaaacaaaacaacaacaacaacaaaggccaggcagggttgctcacgcctgtaactccagcattttgggaggccaaggcaggaggattgcttgagcccaggagttggagacaagcctgggcaacacagtgagacctcatttctacaaaaaataaacaaaagtagctggacatagtggcttgcgcctgtagtcccagctactccagaggctgaagtgggaggatcacttaagcccaggaggtggaggctgcagtgagccaaaaatcacaccactgcattgcagcctggcagcctgggcaacagagtgagaccctgtttcaaaacaaaacaaagtccaacaattatatcttctcaaataatgaaaatgtcaaggcccaaatatcattcttatatttcacaaaacttatctccagcagagggaaatgtctaccagaaagtttccatgctaacattatcagggcaaaggtatcctaatataatttggccattggcaaacactggaatctggatttcagaaaaatgaatttacaattgccttgagagaacatcccaagtaatgtgtgtgtttgtgcactaaaatgtgttgagattttttagtaataagaaatctgtctctatttctgaaggttgtggggcatttgcagagcatcactggtattgccttggcaagcattgctgagttctcttatgcaatcctgactcacggagtgggagccaacactccggggagacagcagtctattcctccccacctggcagccagagctctgaagactgttgcttcctctaacacatgagggaggctgaatccaccaaatataaacagccatccgtcactgcactcatgcctccctctgtttactttcatactaagggtacaaaaattccaagtctcttttgaactgtattttgtatgccaatttcatgcttatttttcctttatcagagagagttaaggtggacgagcatgccctttttgtcatatcagcctgaaaatgttaaaaagctaggtggagacagattagttgtttcatttttgtttaacaaggtatttatacttttagcttaatttcattaagaggaacatcaggcattgcaatcagtattaatcaggggctcaaatacagactatctgggtgaccttgactaagcatcaaggaggtagcctttatttccccttaaaattagtttaacatctctgttccattattcagatctacacaaacaaggcttcctcaacagctatctatttttactagagtctttttttaaaactaaaactaactctaaagaagtttcaacagaatttccacatacctgcattcattagaacttgattctcccagaatacaaagtactctattttaaagaaaaacccaacagtgcacccctgggcagttttcagactgcagcaaatcttttattacaaataattaaatctctccataatgtctcaaacagtatcaaacaccatttcatatctctaacacagagcagagtcggcattcagtataagaaccaagtgaaaagtgttaaatttcaagcatctgatcacatcacatggtgaccaggtaaagcttagatgtcattttcccacattatccaactgtgcatctcaaacatatcctcatctcagtaaagacaaaagtttctatttcatattgttaagtgcaggaagttgagagagataaaaatccagtgaaaacacatcaatctcaattcaactcagttaaaaaaaagaaaagcaaatttaaattagtttttttcagagaagaaagggaaaggagtccatggggttaagaatcaaaactgaccagggctggcaactatagatggcatgttgtagctctggaaagtatctgtcacatgatattttaaaataaagtggcttttgtggattttttcttttttggtattgtaaacatgtactgtttaatattacccgaatttaatttaaaacatgtttgcaaacaaaacaaaattaaaagcctttaaggcaaacctccccctaaggaaaaaagtcatttgttataaaattgtgaggacacccaagcaagaccccacttaagattcgtcagcatgaacttgagagcttttgtccactgctcctcagagttaaactgggttttgatggaataggagccgccactgcctcctgtgtcttcaatcttgcctttctccacatccatcctgcagatggacagagcaaaactcattagtaactgagatctgagttaagtaagttcggggcagggacttgatcatgggaccattcacgtcattttatctattaaagaacacttggtgaggaatgatagtgtattttggatttgcttgaaagccaaaaatcaagaagactgtcacaagagcctcattgtcattgcagagtacagggacaggacacacacccaaagagaagagaagcctggagtaggggtgagtgagggttacagtacttcttgctgttttcctaggcatccctgaacttggcgggggagaaaggaggcagaagaaaagaaatgctttgttttggggtgatagaagcagccttactctaagtaaaaactagagtttccatccatcaatgggatcctagaaaaatcaaaagaagcattcctgtgtatttccaagggcttcagggaaaaaccttcttgaaactggagaggaggcttgagctctatgccaagaaaaccccctaaaccatctaaggcaacattcttctactccaaggactaggtggtcacattctgtcctgcttgcagtactgggtcagtctctgcccatcaatgtcatgtgattctgtgccatttttttgctttcccaccatttatactgttttgcctccattattactgctgcttcaattctgttcaatttggtcctatacaagttcactcagcattgcgctatactgacctgtagggaagacaaaaacgtgtctcgcctttctcaacctcttctttgaactgctgcacacagtccaggaaagccaccattgcatggtcaaacttgttgtcccagaaaaaccgcaaccccccagaacagtataacggcagctcctgcccaagaagagaaaactggctatggatctggcaccaagaaaggcttccagagattgttcccaatcctatcaatctctcaagtcatgttctgtctgtatcccactggaaacttgtattgtagctggactctatcttccatagatttgaacaactacaataagcttgggcaagtaacaatgcacttagaactgtttcactatcaatgaaaatgtaccataggttgagcatccttaatccaaaaatccaaattgctacaaaacctttccaggaagagtacatgggaaaagaaaaataaataaatagaccaggagcagtggctcacgcctgtaatcccagcactttgggaggccaaggtgggcagatcacctgaggttgggagtttgagactagcctgaccaacatggagaaaccccgtctctactaaaaatacctaattagccgggcgtggtggtgcatgcctgtaatcccagatactcaggaggctgaggcaggggaattgcttgaacccgggaggcggaggttgcagtaagccgagatcatgccattgcacttcagcctgggcaacaagagcgaaactccatttcaaaaaaaaaaaaaacccacaaaaagaaaagaaaaaaaaataaaaatatgccaggcacagtggctcacgtctgtaatcccagcactttgggaggccaaggcgggtggatcatgaggtcaggagatcaagaccatcatggataacatggtgaaaccccgtcactaccaaaaatacaaaaaattagccaggcattgtggtgggcgcctgtaatcccagctactcgggaggagaggaggctgaggcaggagaactgcgtgaacctgggaggcagagcctgcaatgagccgagatcacgccactgcactccagcctgggtgacagagtgagactccgtctcaaaataaataaataaataaaaataataaaaaatgctacaaaacctgaaactttttgaccattgatatgatgccacaaggggaaaattccatacctgatacctttgcttttttttttttttttttttttttttgagacagaggcttgctttgtcgcccaggctggagtgcagtggcgcaatctcggcttactgtaagctctgcctcccaggttcacgccattctcctgccactgcctcccgagtagctgggaccacaggcacctgccaccacgcccagctgattttttttttttttttgtatttttagtagagacggggtttcactgtgttagccaggatggtctcaatctcctgaccttgtgatccacccgccttggcctcccaaagtgctgggattacaggcgtgagccactgcacccggccctttgctttctgatgattcaatgtatacaagctttgtttcatgcacaaaattatttaaaatattgtatgaaattacctcagactacatgtatcaggtatatataaaacaggccaggcacggtggctcatgcctgtaatcctagaactttgggaggctgaggcgggtggatcacctgaggtcaggagttcgagaccagcctggtccaacatggtaaaaccccatctctactaaaaatacaaaaattagctgggcctggtggtgggcacctgtaatcccagctactccagaggctgaggcaggagactcacttgaacctgggaggcggaggttgcagtgagccgagatcgtgccactgcactccagtctgggcaacagagcaagactctgtctcagaagaagaaacataaatgaattttgtgtttagacttgggtcccattcccaagatatcttagtatctatatgccaatatcccaaaatctgaaaaaaaaaatccaaaatctaaaacacttctggtgatactcaacctgtaaacatctatctcacggtgattcttttcctagcctagtgcacacaccctcttctgacctgcccatatcccttctcaacagactgtcaaaacctgatttctgtctacaagacccccaaaactaaacctgaactagacaagatattgaacaatatactggctcttcatatctaggtctaaaaaataaattgaatgccaatatcaaagcaaaccatccattttcttaagagatataagaactctgtattccagtgaaaatggagcttcacagagtaccttagatttgtctgtcagagactccagatatgaatggtttccgtaaggaacaagtcggtatctaaaatagagatacaaacagagatggatacaggactcctcccaaagtgattattgggaagttacaacccaatgatttcactcttcattctggccaagggcttcttttattatgctcaactccctctcccacctccccattgaatccatgtttaaaagattttgtttaatgaacaaactacatttattatataattgcctgggggccttccatgaacaaatgttatgttttggtttaaatttaagaaacaaaaactgaaaatatcctgaggaacactaaggctctggggactgtaggctgggaactatgctatagtcacgcaactcagtgactgtgtgatcagtggagagagccctgtgatgaggggaaaatcagatgctgacagctcttcagccacagaaaactcccagtctgtgggcagcaagggctcctgacatggtggacagcagtaccaggttggagatacaaattatatcaatgcacatcactccccaagaaagggctacacttcctacctctgaaatttcagacccatcttattggccagagcatggagcagcaacacagtctggccccaagcagcattaatctcattccattccacgggaacactgggcaggcgacccagcctgaagttattgattgtgccaaactgtccactgtgcctacagaggaaggcagaaaggtggggggaaatacagggattacttaaaaagtttgacatttcccactctcaccccaaacctagcttaaatctatcttcaagtccatatatgcaagctgtacttggcactttaaatacatgtccaaaacttgagtcatcatctttttccctgctgctcagatgccaaagcagaaacctgggtggtatccttgaatgctccctcagctccttccgtgcaaaactgccaacctctcctgattctacctgctaaatatcttggatctttccacttttctccaaattcaatgctactattcttttcctttagattcctactgatgagtatcctttccaacgattccacccctttaccccaagtcattccccatggtgcaggaaaagccatcattcacgaatacaagtgtaattacgtcacttccctagctaaaatgcttcagtgtctcctctgccttttggatgaagtccaaacctcttaacgaggcctacgagatccttcaggaactggtaactctccagtttcatatccggccactctcccctttacactcaatcttcagtcacaataagctcctttctgttctctgaattcaccactccctctttcccatttctttgcacataatgttctctctgctaggaacaaccccctctctgcagacttctactttacctctcagtttaaacgtaagtcccctatggggaaactctccatatggcctccccaaactggatcaagtgcccttatgtgttcccacagcaccctgggtttaccatcatcacactgcattacaactgcttgttatttatccatctcttccaccagattatatgcaactagaaggttgactgcatactgttttgctgttgccctcctagcactcagcacagtgccttttccagagtagacactcaacagttattaaattaatggaacatcaaacaccgtggggataagaaatcagcaccagacagcttaccaggtttttaagtggctgaagggctcaggccttttcctttctttagaagggcggatgtcaccaagctctagaattccaatccctactgtgcctatcccatcactatgaatgaaagaaacctagttgggtgaagataacctacagtccctcttttgtgggaagtgggcacccaggcttagtggtcaacagctaaggtctagatatgtgcagtgctcctcatcccctagctctcattaccagatgtggaaggttgcattaaagacgttggttttcttcagcttatccagctgcgtctgggcataacgcatctggttttcaacactcttcagctcatcatccagctccagctgctgtcgtttaaattcactgtattctctctgatacctgtgagcagccaagggggccattgaaggctgttagcttgggggctaaagtttctctctcaccacactatgaacgattctttagtgatcatcgttacatctagctctcgcatcttttatatttggcatagatcccattctgaggaacatgtatgtcctagctgttttgcctggaaggaacagaaatgtctcaaattccagctgcccatatgcaaaaaggtggaggaaaaaagaattctcccaaaccagggcaaaaaacctcttatttctgatctttttcagaagtgaggtgaatgggttaggagtggcttcttggggccaggcgtggtggctcacacctgtaatcccagcactttgggaggccaagacgggtggataacttgaggtcaggagttcgagagcagtccggccaatgtggtgaaaccctgtctctactaaaaatacaaaaattagccaggcgtggtggtgcacacctgtagtcccagctacttgggaggctgaagtggcagaattgcttcaacccaggaggcagaggttgcagtgagctatcacaccactgtactccagactgggcaacagagccgagactctgtctcaaaaaaaaaaaaaaaaaagagtggcttctgcttcttctgggccgggtgcagtggctcacacctgtaatcccagcactttgggaggctgaggtgggcagatcacctgaggtcaggagttagatgccagcctggccaacatggtgaaattccgtctctactaaaaaaataaaattagccaggcgtggtggcgcacgcctgtagtcccagctacttgggaggctgaggtaggagaatcgcttgaacctgggaggtggaggttgcagacaactgagatcatgccactgcactccagcctaggcaacagagtgagactctgtctcaaaaaaaaaccaaaatcaaaaacaaaaaacagtggctttttccagctggccatggtggcttatgcctgtaaacccagcactttgggaggctgaggcaggtggatcacttgagctcaagagttcaagaccagcctgggcaacatggggaaactccatctctataaaaaatacaaaaattagccaggtatggtgttgcgcgcctgtagttccagctacttgggaggctgaggcgggaggattgcttaggtgtaggaagtcaaggccgcagtgagtcatgactgcaccactgcactccagcctggatgacagagtaagactctgtttctaaaaaaaaaaaaaacaaaaaaacagtggcttcttccatgaactggccataattggccttctaaagcttcatttctatacacttactgtcctttaaatagttactataccccacttccagtgaaacttgttatactactgtgtgaaaaaaatggacttttctctatccttcatttccacaacttcagttagtatggacactgtgtgtcctccactagagagagggttctctcaggtcaaggacatctataatgtttttattttttgagacagggtctcaactctgttgcccaagctggagtgcagaggtgtgatcacagcacactgtaacctcaaactcctgggctcaagttatcctccacttcagcctcctaagtagttgctaggactacaggtctaccacagcagcctaatttttttttaattttcatttttgtagagatggggtctcacttgatattgccccagatggccttaaatcctggctttaagtgatccttctgccttggcctcccaaagtgctggaattacagatatgaacgaccatacctggcccccatgaaatgtttaagcttggagggaacaaatgtaggctaattagctcatcttttcagctaaggatggctagaaagtggctgattcatccaaatgagcccattccctacaggacagagccaagactggagctctggtttctgcactatttaaccaacatacttttttcacttaatcatgctgactcttcataggtaactctcccaacaaacctctagaaaaagggcatggaagcaatatgcaggatctggggcaggcatgctgctgactgacagctgactagtttacaaactattcagacacattcagctggaagccatttcctctcctggagcctcgagtgtgagaagatagaacagggtgagcactcactgagcttcctcctgatccagtctctcagcctcagcctggaccttctcgagattttctgccactatcttgcggttcttttccacgtcttccagctcctggatcagcctctcctcctctagtgccagctcctttagctccatctgtaactgttcactgtcatcctcattcatttgctctaagatctccaaacagcgtctgccaaagacacaggcagactatacttactagagctccatttgcctgagtggagtacggctcttgggtaagggccaagcagtctcagagcagtaacagctctgagccctggctctggagacactcacttgtagttctgacactcattttcagtgacgttgagctgagtgtccagctggtctaaaagagtatctgtgcattcctcacagagtgggtgatccacatctgtctggcccgacatgatgtcaaaaaggtccccagtgacctggaagtgtgggagagtcagggtagggcctcccccatgcttcctgctcaattacccactctcccagccaggcctactgcttgccaccggaatggggccgacttgccttcagtcttcggctgaggttctccatggtgccgccatcagatgcctccccaatcagagtgaagctgttggcactttctgtggacatcatcctgcagacagccccccgcccacgggccacatgagggaacagagaggcttcctccacctactacaatgccagtggcagagactctcaagcaccagctgaggggcctcaaggaacatacccactcctagcccgactgacctcccaagggtacctctctcccaaaggaaggccatgctggtcttccacagggacactcagcatgaaggttggccttggtggactaaggagggagagggagcataaaaaattcatatgtctacagtggaaaagaagggagaaccaggaaaggccattttagaaaatattataccccttgccagcaagctctttacctgcagcaatgagaactaaggacctgaacatctaacaacatttgctagtttgaaacttctcaagagcccatctcttggtgattggtcaatcactccctcaatttttttcaatacttcatcattaaagctactatcctttcccactctgtgaacagctacaggaaaaaatccatactggaaggtgacgggccaggtataagggaatacatcttttctgaaagggccaaaaggctaggtgatgatgcatctctatcacctggctccaggtctcgattcctggatttaattaaaattctactagcctttggcaaggaatgggggctgagaagtagtaggcacctggctggggggatgaatctgcgagagacaccatcctggcgaggagtttcaataaatggctcctgggaaagaaataagagggcattacaactctggcagcttagaggtagagttcatctcccaaacagcctcagaactatatggctttagtcttgataaccacaagacttgataaaccacagagacttaaaaaatgggtattatcgaagcaatccttgtgtatgtggactaagaaaggacccacgatacagacaaaccttaagtcccatttgattttttttttgtggggaacagcatttcctaactatgttacactctatgtatggttaaatttgcatttctcaacacttagcagtcaggggcagaggacagaatgccctaaatcatagtacaaggaaaaagccagatcagactgcaatgaagtctgccacagtacaaagtagaaaatttatatgttttcagtattttgagattactcatatgtgaccaaaatctcacagcatctattgacttcaaatgccagacccctttgcctccttgcttaaaggcttctctggctcctggactcttcactgcctgcagggggcgctggccagaattaatgacctccactaaacctgacatcagcactcccccagtgactggcagctgtgggtaaataaatactccagctcccttgctacttgagaagaaatctcaggtgtgtattcaatagtatctcacaggatgttgctccacaggatccctgatattatcacagcttaaaatgacatgttctctaacactgacaattctttctgtccagggcaatcatacaattcactgtcctaaccaggatgcttttgagaatggaaaggagtggatattaacaactagctagaacaacagatgcaaatcaatgctctagaacgacctggacacacaggtcatcccatctccaacctacaataatttataattctgcttcaaataaagagccctttccaacattttaaaatgactaattcagtaaccctgtgacctcaggtgcagatctgtacctccaatggtgcatagcagcctgatcatgtagaatgtctcattacccagagatcccaaaagtccgggagctctagaagcgccaagtagcctgcagaaaccaagcctgcattcctgttttcatatcatatctctcatttggaatgtttactacatgaggaggataggggagagggcacttctattacctctcctgagttagtctcttcctcctgggtctctcctggtttcgcctgggctgtggtaagtaatggagctaagggcaaggaaaatattgggtcagaaacagtcttattaaagcaggagggcatctgaaagtatgggaaaagaatgtgaaatattctcatcaccaccctcacctccaatttttcttaaagtaccatttacaccaaaagaatctgtggtcttcctcacccccattaaatcagattaaagaaatgttcaattttttaaggcataatggtatcattattattattattattattactttaagatggagtcttgctctgtcgccaggctggggtgcagtggcacgatctcggctcactgcaatctctgcctcccgggttcgagtgattcccctgcttcagtctcccaagtagctgggactacaggcgtgcaccaccatgcccagctaatttttttgtattttagtagagacagggtttcaccatgttggccaggtcttgatctcctgacctcgtgatccacccgtctcagctacccaaagtgctgggattacaggctgagtcaccgcgcccggccggtatcatttatctttaagaatccttatctgtcaaaaatacagaaatatttacagtatttatgtttgggatttgcttcaaaacaattcagagtgggaaggaatggatggggctgtagacaaaacttgattaaatatgtgttgataattgttgcaactaggtgatgggtacacaggagttcatgatatactctgaaattttccatcacaaaagcaaacatcctgtttcccccagaatagcaaggagggaacataaggaaactttctaggaagatgaaacattgctaaattgcaacgatccagattacatcagtgtatccatttgtcaaaaatgtacagctaagattcatacatttcaagtcatgacaatttacctttctaaaaaggtgtgaaaaacataataattgagcagaggatgggaggtgaatggaggtgtagacaacataagaatgtgagaatatggctgattattgaagctggatgatgaatacaaggcaggctatgctattctcttgactatatatgtctcaaattttccataataaaaagtcaaaaattgttattaaaagagtttaagaggcgcggtggctcacgcctgtagtcccagcactttgggaggctgaggcgggcagatcacaaggtcaagagatcgagaccatcctggccaacatagtgaaaccgtctctactaaaaatacaaaaattagctgggcgtggcggtgtgtgcctgcagtcccagctactcaggaggctgacgcaggacaatcacttgaacccgggaggcagaggttgcagtgagccgagatcgcgccactgcactccagcctggcaacagagtgagactccgtctcaaacaaacaaacaaaaaaaagagctaatttcccctcaagaaagagaaaccaggtaataatagcagctaatacttattgaatactatttgcccagcaaattcctaagtgtttctgtggtttgtcatatttgaactttataaattctttatgaggcagtttaacgttttacagaaaaaatcagaaaccaaggcttggagaaatgaagtaacttgcaaaaagttgttcagctagtaaatgacagccaggatttaaacccaagcaggctgactccaggcccataagcttatttaagctgcctattcagtcttctcttttactgtctgacttaatctgaattcttctgactttgcgggattttggggttttttattttttttaattatagagacagggtcttactgtgttgcccaggctggtctcaaactcctgctcaagtgatccacctgcctcagcctcccatagtgctgggatcacaggtgtgaaccaccactcctggcctttttaattaatttattttttgagacagggtcttgcactgttgcccaagctgcagtgcagtggcatgatcatagcttcctgcagctttgacctcctgggctcaagtgatcctcctgcctcagcctccaccacccaccacacccagcaatttttttttttttttagagacaagatctctgctaggttgctcaggttggtcttgaactcctgggctcaagcgatcctcccacctcagcctcccaaagcactgagattacaggcgtgagccatcacatccagcaaattcttcagactttaagactctactccatttaccagctgttggaccttaggtaagtcacttaacctctctgtgcctcggttcttcatctgaaaaatgatgtaatgacggtataccccgtacgggttgttacagggactaaatgaagtaatacgtgtaatgcacttggtattactatatagtaagtcctcaaaaaataccatttattattatatatacatattccttttctctgaaacagcaggagcagaaaataaggatctttcttttgctactgaaagctctctttttttgagacggagcctcgctctgttgcccaggctggagtgcagtggtgcgatctcagctcactgcaaactccacctcaccggttcaagcgattctcctgcctcaacctcccgagtagctgggactacaggcacgtgccatcacgcccggctaatttttgtatttttagtagagaggggtttcgccatgttggccaggctggtctcgaactcctgacctcaggtgatctgcccgcctcggtctcccaaaatgctgggattacaggcgtgagccaccgcgcccggtcggaaagctctcagaagtccacaatgtcagaatgctttatgtttccaaggagaaaacagggagccagatgaagtgactttcctaggttcacacgatgagtttgtggcagactacacagccaccataagaattatatcaccaaagctgcccaccttccacattcttgaccaccctctttccaagggtctcgctgacctgtgagttcctggatggtgacacggtccaggatcttgaaactcgtgtccagtttcaggggctggctgcagcgctggcacacgaagctcacctgcatggtgctgttgttggacgtcttagacccttccatccctgaggccgtggaaaagaggcaacattagggagaagcgacgcccttgacctccggcccggggttaccacatgccttggtgacgatggtaaagggagggaagtcccaacctgcgccgttccctctaggaatggtatgatacggggaggacctgcttccgggacagcctgagcaaaggcagtttagagcccagggtcagggaagggactccaataagagccgtgagggttcccagactcccttctaaggtcccacctcagcccccgatgctcttcacctcgggagcccggagcccgtcacccaagtccggtctaccgcggaggcactgtggcctcgggtcggccccggagcgaggcctccagaactaccatcgctctgtcttcagcgacttcccggtagccgccggaaaacttccgcccgagaccggacgtgacgctacgacggcagcaggagctcctggtccacaggctcacaggcccggcagcggcccccagaggccgggctgggaaaagcagcgggcttcagcggatgaacaaggttaccacgggaagtgtaggagccaaggccgcagagaatggggaggctccgctattctctaaattcagggggcggcgggcgcggtggctcacgcctgtaatctcagcacttggggaggccgaggagggcggatcacgtgaggtcaggagttcgagaccagcctggccaacacagtgaaaccccgtctctactaaaaatacaaaaactagccgggcgtggtggggcacgcctataatcccagcttaatcccagctactcgggaggctgaggcaggagaatcgcttgaacctgggaggtggaggttgcagtgagccgagatcgggccactgcactccagcctgggcgacagggcaaggctccatctcagaacaacaacagcaacaacaaaaggccgggcatggtggctcacgcttgtaattccagcactttgggaggccgaggcgggcggatcacaaggtcaggagttcgagaccagcctggccaaaatggttaaatcccgtctctactaaaaaatacaattagctgggcatggtggcgtgcgcctgtaatcccagctactcaggaggctggggtaggaaaatcgcttgacccccggaggcggaggttgcagtgagtcgagatcatgccactgcactccagcctgggcgacagaaggaaactccatctcaaaccccccccccccacacacacacacaaaaccaacaaaaaaagaaagtgatattcaaataaaagcttgaagaaggtgaggaaggaattcttacctgcatcttaaggaagagcattctaggccaagggaacagcaagagcacagagggtacctgtttggggattagcagaggctggtgtggctagaagatgggcaacgaaaagagatacagaaaatggggtgagggaggtaagagtgttgagctaccacctaggctcttatagggattgtaaagctctggctttcactttgaatgagatgagatgactgggtcttgagcagagggacttacttcatttttaaaaacaactttatggggtataatttacataccataagactcacactttttaaatgtacagttcaataatttttagtaaatttacacagttgcccaactatcaccataatccagttttagaacatttcccatctccccttgcaatcccccactgtggcctcccaaagtgctgagattacaggtgtgagccaatgtgcctggccaaaagtttttcatttcaataaagtccaatgtttatgcttttggtgtaaaagaaaccactgcttaacccaaaattgtatgtagtattgtctattttatttttattttgagacagtgtcttactctgttacccaggctggagtgaagcggaacaaacaaacatggctcactgcagatttgacttcctggctcaagcaatcctcttgcttcaacctccagtgtagcagggaccacaggtgatcactaccatgcccagctaatttttaaaattttttgtagagatgtggtctcacactgcactccagcctcggtgacagagcgagacgccatctcaaaaaaaaaaagagatggggtctcactttgttgcccaggcttctgctttttaaatttaacatttttctatgttgctacacagttattgtagttatcatggctacattacactacactaaatgtactgccttagtgtatttttttaccgctggaaattctactatttcccctgtgggtgattacaataatcctgcaatgaagagctggctacttatgatagagactcataactgggactacagaattaagagtgtgtcagctatttaatgtctcttccttaacactgggaatcattttccaaagtgcttgcacataactatattctgcttccagtaatgtatgaggaagcctgttttcatattgccttggccagtattgggtatcatatatttggggaacaaaagcaaaaaatggcacttccttgttattttaattagcatcattgattgctggtaaggctgaactttttgctatgtatttgcttattgtagttacttttttttttttttttgagatggagtcttgctctgttgcccaggctggagtgcagtggtgccatctcggctcactgcaacctctgcctcctgggttcacgccattctcctgtctcagcctcccgagtagctgggactacaggcgcccaccactacacccggctaattttttatatttttagtggagacggtttcaccatgttagccaggatggtctcaatctcctgacctcctgatctgcccgccttggcctcccaaagtgctgggattacaggtgtgagccaccatgcccggcctttttttaaaaaaaaaaaaaaaaagagacacggtctcactctgtcacccaggctggagtgcagtggtgcaatatcagctcactggaatctccgcctcccgggctcaagcagtagttacttttttctgaattatgtttgcattctttgattatttaggtattggattattagtatttttctcagtatttttagtaatttttcatgaatgctttaattattttccagatgttcaggaagttttaaattttcaagtcaaatctgcttatttttcttgatgacttatactgcttagaaagttattcccacctccagaagtgtctttcttttcttttaaatgtatgtggtttcttatagttggtattggatgtgatatgtggaactagattgatttttctcccggttttgtgactagggatagtgtttacaatccttcttcctcttggctctttcagcatgaaagcccctttaggggaggtgactggaatcatccccaaagaattctcacctagtcctggtgtggctgcttcatagtcctgcgtttcttcctgcttggctgtccctaacatctcagaaacgcatagagaagtaacgggcttctagagaggtagggggtatagtgttacaactgaggatttggaagttgagaccacctggttctttaccatccactaaccatgtgaccttatgcaatttattcaactgttctgtgctttgttttcttatttacaaaatgagattaatagtatacagtagtaaatatcataaagggtagtgtgataaatgagctgatacatttggaatggaggggaatgactgttacatagtgaatgctctgtgtatcctcacacttgggaagtatatgtaatcagtgtatgtagtgcttgagggattgtgaataatacacaacatatcctcagtcatcgattcaacagatgtttattgagcatctactatgtgccagtccctattctaggtctgagaggatatactggtgaactgctctaatagtttatattccagaggagagaatttgacagtaaacatgtaaccaagttaataagataatttcagataatggcagatattatgggttgaatgatgtcccccaaaagatgttgaagtcctaacatctgggactaacacatgggaatgtgaccttttttggaaataggatcgttgcagatgaggtcattgatgttagccctagaccaatatgactgcgtccttataaataggggcaatctggacacagagacagacatgtaccgtgtctgagggaagatgatgtaaagagacacagggtgatctgtaagccaaggaagacctgaggctaccaaaagccaggaaagaggtctggaacagatacttctctggctcccttagaaggaacatggtcctgctgacaccttaattttggatttctggcatccagaactctgagacaatatatttctttggttctaagccatccactttgtggtactttgctacagcagccctagaaagctaatacagtaggtaagaaggtgatgtgatagagagtaagtgggggcagggtgggaggagctgcttcaactgggggattcaggaaggcctatgttatctggaaaccactgagggtggtaagtagggaagagacttgactggctgacttaaaaagaaactatttacggggggatagaatacataggggaaaagacacaaatcatacatgtattttcaatgaatttttacaaaatgaacacgtcaatgtaaccagtacccaactccctctcccatgccaccctctaattgatgcccaccctaagggcaaacaatattgtcaattctaacaccctagattgagttttgactgttttttgaatttcatgtaaatggaatcatacatgacatactcttgtttcctttcgctcatcatgagattcacccaccttgtgtagttttagttcatacattctcaatactttgtagtattccattgtgtgactatattaaaatatagatatctctcttgctgttaagaggcatctgggtagtttccagtttggtctattgtgaatagtgttgctatgaacattcttgttcatgtcttttggtgaatatatttatgcatttctcttgggtgggtccctagagttgaggtttctgggatctctctctctctctttctctttctctctctctctttaggtatattcagcttgagtagatgctaccatctctgtggctgacatattagcagattattttgagctggcctggtgtgcacctgtaatcccagctcctcaggaggctgaggcgggaggatcacttgagccaggagttcgagaccaacttggacaacatagcaagaccctgtctcagtcagtcaatcaatcaatgataaattttggtgctgagtgaagaacagaatgtgacagttggtggggggtggcaagagtggaaatggagagaccagataggagcctattgtaatagtcctagcaaaggatgacagtggctttggccagggtaacaagagatggaggaaagcacactcatacaggatgcattatacagggaaagctgacaggacctgctgatgggttgaatgtggagagacgaggaaaagagaggaatcaaggttgactgttaggtttttggtttgaacaactaggtggacagttatgtcaattactgagatggagaagaataggaaaataacaggtgtgtgggagaatcaagaattctggtttggccatgttaagtttgatatgctcattaggtttccaagtagaaacatcaaatagatggttagaactcagtgaagatgtcagatgggagatacgaatctggggccctcaaatcagcatacagatttttttttttttttttttttttgagatggagtttcgctcttgttgcccaggctggagtgcaatggcgcgatctcggctcaccgcaacctccacctccccagttcaagtgattctcctgcctcagcctcccgagtagctgggattacaggcatgtaccaccacgcccagctaattttgtatttttagtagagacggggtttctccatgttcaggctagtctcgaactcccaacctcaggtgatctgcctgccttggcctctcaaagtgctgggattacaggcattagcccccgtgcgtgtctggccgaatacagatgatacttaaagctatgaacatgcatagatcctcttttttttttttttttttttgagacggagtctcgctctgtcgcccaggctggagtgcagtggcgcgatctcagctcactgcaagctctgcctcccaggttcacgccattctcctgcctcagcctcctgagtagctgggactacaggcgcccgccaccacgcccggctaattttttgtatttttggtagagacggggtttcaccgtgttagccaggatggtctctatctcctgacctcgtgatccacccgcctcggcctcccaaagtgctgggattacaggcgtgagccaccgcgcctggccgaacatgcatagatcctcttagggagaaagtgtaagcagagaataaaggacctaagtctcctgaagcatgccaccattaagaagtggagcagaggaggaagagccagcaaaggaaatggggaatcactgttgaggctggagaaagatcagaacaggttgctgtgtgtattttaagaaggggagtggctaatatattgagtactactgagagattcaaataagatgagaggtgaccactggtgtcaacatggtagtcattggtaacctaacaaaaattatatcagtgagaaagtggggttgagaagtctgattagagtggattggagtaaatggggcatgaggaagtagagtaagagacaataaataattcaagaagtcttgccaggaaggagagcacagaaagggagtaacagctacagaggaatctggattcgggggggagttttctcaagataggggatattggttatgtctggaaatgacccagcagaggatgtgatgtaggaaaaagaggggctaatcatgggcacagacatgggattgagaaagtcaaaggggatggaatccaaagcacaaaaggaagagataggaacaggtttgtttccttcaatgaaagaggaaaggcagaaagtattttgcagattggcagatttggtggtgagatgatgaggtagttctcatctgcttctgttttctcaataaagaatgagcccaggccataagttggaggtgggagagaaggaatactggaggttcagggagatgagaaagtatgatagtcattgggagggtgggagagcaaacttgtcaggagcatgtagtaggagctcaggcagtgttgtgcactcatttgagattttgggacatgaatttaaaattagaccagtcatcagtgatcacatgtgacttgtaagcacccagaaatgaatagttattgttaagtgtagtggtactctccagttgttcactgaataaacaaatgaatggagtattatattaaacacttggatggggaggaggaagggaaataaagagaatgtgtatctgtcttataacctacttgaaggagacaaaacataattatttgagaacaaagcatattttaacaggcacaaacatattagcttttccagttgatgttataaattctgactggaataagaatagtggcatacttaaaatagaatggagtaaatgtgggaaataattcctgaagtttcaaatcggatctcaaaagttcccagggaaatgtgttaacagaaaacatgtaaaagggggaaaactgatagagcatgatgttatatgtggccttctataagctgaaaaggactttgagcttgaaagcaggaatggaaataattactgtaatttaaggagtaacctcttcatgctaagcattaacagatcacttacttacctgacagtggctactatttattttgtgtctaagcactgtgctaattgttttacatatattatttctaatattcacaacactacaaaattacatactattatttattactaattattaaaattccatcttacagatgagggaatcgagactcagcatttcaataatttgcccaagattccagttagtaaggagctgaggtgggatttgaagcccaggtctctgatcccaaaggccatagtcagtcttctgtgctttactccatttaattgtgtattcccctcattttcctagcacttagtagagaggccagcctaggataaatgttcaacagcaagagcgaccccaaaatacaaatctgatgacctccttttgcacttaatctagattgtttactaacaaccctcctcaccctcagctcactagtctttgtcttcaagacaatctctttccttccctagagcatttgcctgagctgcccttatacctctcaaggctcttctcactctttccatgctaacctctttatatcctttagatcacagcttgcctgttcagaggccttccttggccattcgatctaaaatagatctctcgtattttctatgtcatccactttttccctaacatttatcaaattttgcagttaccttgtcagtttactttctggtgtttttccaatattatgccccatgggaccagcgaccttgaatcttgtttgcctttgatttcccagagctgtgctcttcaatacagaagccagcagccacatgtggctactgagcactgtactacaaatgtggtgttgccttattgagatgtgcagttaagtgtaaaatacgcactggattttgaagacttggtatgagaaaagaatgcataagatctcgatttttaaatgttgattacatgttgaaatacttgtataaactgggttaaatgtatgactaaaattttcacttgttttactttttaattgtggctactagaagatttcaacctacatatgtgactcacatatttctagaatctgacacagtgccctgccccattttattgaatgatatatccaatgtcgagagagagagatcgaatgaatgggtgcatgaagaggtatagtctcatgcttccactaggcaaatagatacagcactgccgtagaagttaggagatctgggttctggctcaggatgtactggaaacgccttggacaagccctaccctactctggggatcaatttgccaattaggtagttgatctttgaggtctggaagcttacgagaatcagttggcagggaaatgtaccaggaaagcttggtacaacggcgcttgtctttttcgctctagcctaaacacttgagcctcggcaaacgggcagaggcagcgggaatcagggactacacccccgaacccagtacccgggtccccgacttccccgagcctacgtcactggggcgcgacggcgttgtccccgggagtgcagcggctgagaaggtcccttcggtgaaggcgagttccgggacaacagagagggccgcaccgtttccgagtctctcggaggctcagttctcagcgcaccattccccacagctctcctttttactttacccctacccgacacttgaccccggcagtgtgaaccccgctgggagcgtccaaagccatgcctcatcgcggctgcgcagcgcacgtgcacagcctcgcaggagtctcggcgattggctgtgacgcagtttccggcgtgagcggcgaaagccgggagggcgagcgagagagcaagcaggcagcaggctgccggcgggcgggcggacggcacagagggagggagcgagcgagcagtgagtaagccagcaagggcggtcgggtcccgaggtcagccgagatttctcaggtccctccggccccctccctggagtccacagcgcctccggtgtccagaggatcggacacggcccggcccggccatggcctcgttgctgaaggtggatcaggaagtgaagctcaaggtagcggcaccggtccggcctttttgcccctcgctttgatcccccagcagtctgaccggcttcctactccccatggcgtctttgtctccctggggataccagctctgagcttccgctcggctcagcccagcccccaactcccggggtcggcttcgcgggagaggaaaatataggatggctttctgtaccgcgtctgatgatggagagtcccggggacacctccgcggacacgtgttggactcagggctttaggcccgtgacagctggtaatcccccagcccaacaacgtccctggacactgcccctgcccttggcggctggcctgcctagtatcatagactaggtctgggtgggggttggcacgtttgtgagctcacatcttccctaactacctgtcttttgtctgcttatcaaattcagacagcttcagacacaggaggaagggagggaagggggaggacagaggagacaggcaggtgctgtcctcaaagccctgcgttcttctgagatggaaaaatggatcctcaaaaaaataaagtatttgcagtctgggggcctctcagcttcttattacagttacaaggtgagggaaagacagttggattgggattctccatcctgctcttacctctgtccccaggtactgaattgctctctttgttaattttaggttgattctttcagggagcggatcacaagtgaggtgagtgaaataaatagaaaaatggttgttggttgagaatttcccaaagaggagatacctggagagagagagagagagagagagagagagagaccttcccacagatattaattcagctgtattttccctcttccttaggcagaagacttggtggcaaattttttcccaaagaagttattagaacttgatagttttctgaaggtgagagaccctattctttcctcaaattccccaatttttttggccctggtattactgtcaactgggataaactgttgattcttcttctttttatttttttaaactgtaaaagcactttcatttcttgctcttcaaatcaaatacttctttgttcagcttgaaaagattaatgttttggggtgggtgtctttcaggaaccaatcttaaacatccatgacctaactcagatccactctgacatgaatctcccagtccctgaccccattcttctcaccaatagccatgatggactggatggtgtaagtgtcctatatttatctttgtgttcttgagcagtaggtcctctgtcctctgtttccttgtcagtttaagatgtacagagggaacagtgggatttggatctgggaactaggactctgttacagacatgatgactctagtatagttcttttatttcttatttatttatttatttttgagaaagggtgtcactttttttgcccaagctggagtgtagtggcgggaatgctgctcactgcagccttgacctcccgaactcaagcgatccttcctcctcagcctcgcaggtagctgggactacaggagtccaccaccatgcccactgatttttgtattttttgtagagatggggtttcaccatgttgcccaggccggtctcaaactcctgagctcaagtaatccacccgcctcagcgtcccaaagtgctgggattacaggcgtgagtcactgcacggggactccagtatattccttttagaccctcagtttcatttacgacgtgaagtgaatgtgctaatgctactgtcagtgttagagtgagtttcaaataaaagagaactagcttaggccaggcaccttggctcacgcctgtaatcccagcactttgggaggccgacgtggacggatcatgaggtcaggagatcaagaccatcctggctaacaccgtgaaaccctgtctctactgaaaatacaaaaaattaactgggtgtggttgtgggcccctgtagtcccagctacttcggaggctgaggcaggagaatggcatgaacccaggaggcggagcttgcagtgagctgagattgcgccactgtactccagcctgggcgacagagcgagactctgtctcaaaaaaaaaaaaagagaactagcttcatcaggttacctggtttttcccatggctctgaacaagactttgcttatatttgtttgcatgtcttgagtagtgttatgggatatgcagttctcgctatgtaactgcaattgctatctttgctttgcatctctaacacctagtccttatcagtcatgtgtccacatgctactataacactgatgataccgtattgttgtctgtagtactgcctcattgttgaacttgtacatctggaaggcaggaactatctttttttttttttttttttccttgagacagagtctcactctgttgcctaggctgggtgcagtggcgcgatctcagcttactgtaacctccgcctcccgggttcaagtgattctcccacctcagcctcccacgtagctgagattacaggtgcacaccaccacgcccagccaatttttttatttttagtggagacagggtttcaccatgttgtccagactggtctcgaactcctgacctcaggtgatccgcccgcctcagcctcccaaagtgctgggattacagccatgagccatcgtgctcggccggcaggagctatcttaatctttgtattcccagcacctagtgttgatcctggtccctagcaattgctgaatacatgtttgttaactgaataatgtgttcctttgtggaaccagcagatttgtacgtattcccttaattatcttccctgctttgattggttcttttttcctattctttataatacttaatgtattgtgtttctggaaagattggtcttcccaactagagcgtaatttgctttgtggtaagaaccttttctttctttctctgagggggaacccagtctcactctgtcacccaggttggagtgcagtggcttaatctcagctcactgcaacctcaaactcctgggttcaagtgatcctcctacctcagcctcccaggtagctgggactacaggtacatgtgccatcacattcagctagtttttgtattttttgtggagacagggtttccctatgttgcccaggctggtctcaagctcctgagctcaagcgatctgtgtgccttggcctcccaaagtgctgggattacaggtgtgagccatggcgcccagcccaagaaccttttctttatttccttttttttttttttgaggtggagtttcactcttgtcacataggctggagtgcagtggcacaatctcggctcactgcaacctctacctcccaggttcaagcaattctcctgcctcagccttccgagtagatgggattacaggtgcctgccaccacacccggctaattttttttatttttattttttggagatggagtcttgctctgttgcccaggctggagtgcagtggtgcaatctcggctcactacaacctctgcttcctgggttcaagcagttctctgcatcagcctcccaagtagctgggattataggtgcttgccaccacgcccagctaatttttgtatttttagtggagatgaggtttcactgtcttggccaggctggtcttgaactcctgaccttgtgatccacctaccttggcctcttaaagtgctgggattacaggcatgaaccaccgcgcctggctaactttttgtatttttagtagagatggggtttcactatgttggctaggctggtctcaaacttctgatctcaggtgatctgtccacctcggccccccaaattgctgggattacaggcatgagccaccgcgccttgcctccaataacctttcttaaagctttgtatgtacttaggaaattgtgcagaaattaataacataagctatgaggctgaggaagggattaaacttgcttgaagggtatcttgtgatggagatgtgggtgtcaaaactaggctcatccctgcctctttgtatccttagcccacttataagaagcgaaggttggatgagtgtgaagaagccttccaaggtaagaggcacccttacctcacctcccctcaccccatccctgacttgcaaccctgagaagcaggatggatctagtgttctcctgaccaggaggcaagatctaatcttacttcccagaggtagcattcccagctcctccaaacgtgcttgttattgagtgctctaaacctggttttccaataaacagaggatttaagacttttgttatgttttagacgctcatctgtagttctttttttccatacattctcgttgattctaatagtggtgtcatggtaggattgtgacaaaggcagaggtcatagcatctgataggtatagggaaaatgagagagaggcaggggatgctgtgtccttccctcttccctgatcatttgaccttcacatctctgccaggaaccaaggtgtttgtgatgcccaatgggatgctgaaaagcaaccagcagctggtggacattattgagaaagtgaaacctgagatccggctgttgattgagaaatgtaacacggtgaggcacaggctggtgacctatgggccggccccaagtaccccacctgaagtgcaaaaaacagtggatgtacgggtggtatgggaattggcagactaggtttttttgagttttttttttgagatggggtctcgctccatcacccaggttggagtgcagtggcgccatctcggctcactgcaacctctgcctcctgggttcaagtgattctcctgcctcagcctcccgagtagctgggattacaggtacctgccaacacacccagctactttttgtatttttagtagagacggggtttcaccattttggccatggttagccaggctggtctcgaactcctgacctcaggtgatccacccgcttcggggtcccaaattgctgggattaccggcatgagccaccatgcctggccagactaggtattttgacttctgtgttcctggcatctggctccagccgtctgaattgtgtacttcatggcttcagccttcaggcaaaggtcctcatatatgttttgacctccaggtcaaaatgtgggtacagctcctgattcccaggatagaagatggaaacaactttggggtgtccattcaggtaatgtacttgaattacatactgggaagagtggcttgggagatactctcatctcccctgcgttacctttttttcctttttctttggggctgctgtggatgacatggaagtggcttttgatgcacctgttgtttgtttgttttaggaggaaacagttgcagagctaagaactgttgagagtgaagctgcatcttatctggaccagatttctaggtagggctgcttgggcttggccgaggcgttgggggctgatgaggtggtgggcaccatcaagggtctcctgcatcttcctcctcttctctctctttccagatattatattacaagagccaaattggtttctaaaatagctaaatatccccatgtggtaagtaaggggtttgtggcctgagggtggaggtggcaggatagtgaagagtgactgttactgggaaggagctgtctggaaacaattgggctttggggactagctttttcctgtaccctccttgcaggaggactatcgccgcaccgtgacagagattgatgagaaagaatatatcagccttcggctcatcatatcagagctgaggaatcaatatgtgagtaatctcagtccttgtccatagttgctgtggcttctcttagttctgttgagagtattgttaaaattctctgaagggctgagatgagggtctgaggtaaaatgaatagaccaaattctattcatcacctgagtgttgagaaccatgaagtcatctagcagggtatctctcttttttctacctgagtggaggggtgtgcagtacaatatggttaagatataggtgtcagagtcagacagacttaggtttgcaaccaggctctacctgtgttgtgtgacctcgagcaaattgttcaagcttaaacttcaatttcttctttaaaatgggactgggctgggcgcagtggctaatgcctgtaatcccaccactttgggaggccaagccgggtggatcacctgaggtcaggagttcgagaccagcctgatcaacatggcgaaagctcgtctctactaaaaatacaaaattagccgggcctggtggcacatgtctgtaatcccagctacttgggaggctgaggcaggagaatcacttgaacccgggagttggaggttgcggtgagccaagattgctccattgcactccagcctgggcaacaagagcgaaactccatctcaaaaaaaaaataaaaataggctgtaatcccagcactttgggaggccaaggtgggtggatcacttgaggtcaggagttcgagaccagccttaccaacatggaaaaaccccatctttactaaaaaaaaaaaaaaaaaatttagccgggcgtggcggcacatgcctttaatcgtagctactgaggaggctgaggcgggagaattgcttgaacccgggaggcggaggttgcagtgagccgagattgcgccactggactccagcctgggcaacaagagcgaaactccgcctcaaataaaaataaataaaataaaataaaatgggactgaagaggccgggtgtggtggatcacacctgtaatgccagcactgtgggaggctgaggcaggtggatcacatgaggtcaggagtttttgaccagcctggccaacatggtgaaaccccatctctactgaaaatacaaaaaattagctgggcatggttggcggacccctgtaatcccacctaatcgggaggctgaggcaggagaatcgcttgaacccaagaggtgtaggttgcagtgagccgagatcgtgccactgtactccagcctgggcaacaagagcaaaactccgtctcaaaaaaagaaaacaaaactgaagagtacctactgcacaaaattcattcgcttttttaaaataagtgagataacacattgaaggacctggtacaattcttactatgttaagtgcacaatacatgttagttgttattagacacttggggccttggaaatacccatttatacccagttgaagtataagagaggtggtgctgccaccctgaatgcaggctcaagtgagattaaaattacagtaagttggccgggtgcagtggctcacgcctgtaaccccagcgctttgggaggccgaggcgggcggatcacgaggtcaggagatcgagaccatcctggctaacatggtgaaaccccatctgtactaaaaataaaaaaaattagccgggtgtggtggcaggcgcctgtagtcccagctactcaggtggctgaggcaggagaatggcatgaacctgggaggcggaggttgcagtcagccgagatcgcgccattgcactccagcctgagcgatagagcaagaccgtgtctcaaaaaaaaaaaaaaaaaaaaatacagtaagtcttcacttaatgttgtccataggttcttagaaactgcgactttaaaaatgatgtatatcaaaaccaagtttttttttcattaacattgtaacaaaatgacatcgaacaaaatgatgttatttgaaaccaggttatttgaggaccttctgtacttgatttgcttacctgctgtactttaatttccttcaagtcgcagttgctaagaacctattgatgacattaaggacttaccgtatgcagatgattgcttggggatttgtgaaggggtctctcattttcttgatgaggtaagggttgtacagatatgtgattcccctgatccctcttctctcaggtcactctacatgacatgatcctgaaaaatatcgagaagatcaaacggccccggagcagcaatgcagagactctgtactgaggccagggccagggccaggggactctgtgagtctggctcaagaccgacattgccttggtttgttacatgactatcgtgatggggaaactggctggaaatagtaatcacacctctctgtttttagttagagtctaatgaaactctcatctagttctgtgatgtgtttacctcttttttcaggcctcaggaactcttctatttccttccctaataccccacacccaacctgtcgtaatttctggagaactccaggtttgtgtgtgcaggatgttggcacaaaaatacctgtgttttcattctccccctctctccctcctgtgtcttgcgctttatgttttcttccgtttgataattagttggttaaaagctgagggaaccggaaggaaagtgctaggtgttttttaggaactagggtggcggggggacgaacttctcttcctcacatgaggttactgtttctttcctctgtggggcattggatcctcccacagttgccctggtgatgacttagggcttcccatctgtgtacatcccactttgaatcttgatcgtgacaagaaataccttaggccttcagtcaattccgaagctccttcagttgtttttataatgggcgttttcacatgcacatatgtgtatgcatgtatacgcccatacagacatgcacacacagactcctactccattagctaacataccctccctctccacaacccctgtcacatacctttcaggaggtgacagttgtcttagttgtcatctacccagacaaacgtcctgggcccgtcctccctcctgatactgtagcctcttggtacccagggtgagttggtggagaacagagagatgagaagcagagggcttggggaaagcctgttcctctctgactcagccctttttggcattattgcaagagcttgactcctggttgccttttcccagccagttttcagttggggtgaaggtttctgcaagtgtgaggtccagatgctgctgctcatgttgggctttccttttgggaactatttctctttatttatagtgtcgggcttccggggaaagcaatcattggtgtgtatgtgtatgtgcatgcacacacgtgcatatacacatttgtgtatgtggaaatgtgctgggcaagtcaaaactatagaagagttgcctcctgtctctcgaatcttccagagatatcacttaattgttaacagcttttgtgttaatccccttcagcccctagctcttttattctaccacggctggagagttgatacctgcagtcagcctgccagtgactcttagtgtctgtttctgacttatttttcctgtctctgtcttccaacccccaataatatttccaccggggatgcatcatttttactcccaatattctgtagagagggagtcaggatgctgtcttcccacgaatagtactcagtaacaaaccaattgcattttagttgggcagtgctcccacccaccctccagatcccttccagctaaaacccttcccccttccctccatgtgtttctcagtttcccgtttcgtttgttggactgttccactgcccctcctcctcaccctatcacccatggatcgtaatgtaaaattcttttaccatgtcaagaaattattaaaaatacaggtactttgacctctttctaaagccgcagaccctggtgcaatgctctggtggctagggatgtactcatgctcatatgtgtgcacgcttggacacccacctccatggacacctagccaccctgttgtgtgtccttatgccagttgagctgaatcttttccccagtatagtggaaagactgaggcttctgcctactgagcaaggttgggtgcttcatttgtgttcagtctgaattatgggaaagttagctcttcccagacctaagctgccttctctccctactttcagaagatcctagttccttccttcccgagtgatacccatgaactgccagtagaggctgctatcgttccatgtgtaaggaatgaactggttcaaggcgcgtcctacccagtcattttctttaccttatactaattcttcctgaataatgtcttcagtttcttgaggagactcctagttttggttttcaaattacttggagggctgcctaggaatctatctccctctgaaataaagtttcctcatcttccaccttgcaagtagccttctggtttccaatgatcccctcgttgtctctgtaaaaagagtttaaggtcttgaacaatggaggagcagctgctctgttctgtttcagagatgactaccaaaagctagcggtttgtgagtgcctcccctgtgccaggctgttaagtacctaatgtgcatgatcacatttaatcttcaggaatctataggatagttgtatctatttgttacagatgaggacactgagactcaggataagtatttccgctaaggttacacagctgagggaactgggattggtggacaaacctgattactaagcccaggccctcagccactccactggttggaaatggcctgactacaaatcaagggcttggcattaggcaacaagtagaattcagtgcttactgctgaacatggcagtgaatcctggagctgttgggatgcagttcctgccaggaggtaggaaaatggacagcttagtgcttgcatgcaggctgcagaacttaattgggcatctgaggtttgtactcttcctgagacccattccaggtggaaactggaggttagcatcgttaacccagattccctttcatctggtctaaatgatggaaatcagtagttggtactgactgctaccagtgggagttcaggggcaaggaagaggctatgcatgtggaagcagtgccctgggccaaaccacaggacagaaaattggaacagaattacataaatcaaggtcagaaatttcctgcccaacccatggggtggagttttctcccttcctatccatcctagcgaatataaaccccgacttgatgtcagtaactggaaggagcagctgttagaattctgatttcagctctcagcatccaccatgcatctcaagatagtcctggcgttcctggcactgtccctcattaccatctttgccctggcctatgttttgctgaccagcccaggtggttccagccagcctccccactgcccctctgtatcccatagggcccagccctggccacaccctggccagagccagctgtttgcagacctgagccgagaggagttgacagctgtgatgcgctttctgacccagcggctggggccagggctggtggacgcagcccaggctcagccctcggacaactgcatcttctcagtggagctgcagctgccccccaaggctgcagccctggcccacctggacagggggagccccccacctgcccgggaggcactggccatcgtcctctttggtggacaaccccaacccaatgtgagtgagctggtggtggggccgctgcctcacccctcgtacatgcgggatgtgactgtggagcgtcacggcgggcccctgccctatcaccgtcgcccggtgctgagagctgagtttacacagatgtggaggcatctgaaagaggtggagctacccaaggcacccatcttcctgtcgtccaccttcaactacaatggctctaccctggcagctgtgcatgccacccctcggggcttgcgctcaggggaccgagctacctggatggccctctaccataacatctcaggggttggtcttttccttcaccccgtggggctggagctactactggaccacagggccctggaccctgcccactggactgtccagcaggtcttctaccttgggcactactatgcagacttgggccagttggaacgggagtttaagtctggccggttggaagtggttagagtccctctacctccaccaaatggagcttcatccctgaggtctcggaactctccaggtcctcttccccctcttcagttctcgccccagggttcccagtacagtgtgcaaggaaacctggtggtatcctccctctggtcatttacctttggccatggggtgttcagcggcctgaggatttttgatgttcggttccagggtgagcgaatagcctatgaagtcagtgtccaggagtgtgtatctatctatggtgccgattcacccaagacgatgctgactcgctatttggatagcagctttggactcggccgtaacagccgaggcttggtgcggggagtggactgcccctatcaagccacgatggtggacatccatatattagtgggcaaaggggcagtccagctgcttccaggggctgtgtgtgtatttgaggaagcccagggactgccccttcgaaggcaccacaattaccttcaaaatcatttctatggtggtttggccagctcagcccttgtggtcaggtctgtgtcatctgtgggcaactatgactacatttgggactttgtgttgtacccaaatggggcacttgaagggcgggtccatgccacgggttatatcaacacagctttcctgaaagggggagaggagggcctcctctttgggaaccgtgtgggggaaagagtgctgggaacggtgcacacacatgccttccacttcaagctggacctggatgtggcaggtgagtgctgaggggatgaggatggagacttgggggcggggtcaggtggggtggagggaagggaagggaatctcccaggtcaagctgaaataacaagtggcaagagcagggtgttccaacaccacagctctagtggcaacagggcagggactgtttgagcatattcagtgcagtgagtctggtactgggctactgggtatctggtaaaaggtgaaaagagttcccccgcccagcccctctgacttgctatgattgtgaaactagtttaaatgtaatggctgggcatgattgccttagcctcaagtgacactgggtgggtgaactggcccaatggggctggagttggagcactttgcttcttcctaattctgagggtcagtaggggtggggagggcagggtcctgagccgaggtcggaagaagtctgtccagagtcttcagggtgggggtcgacctggggcttaggaaggagagggtagcaaagctggggttgctccccaggatagggccactcctcatcgggagggccatcccattcctgtcatcacagttgactcatggcaggcacacagcttgctgcaagtatggaaagagatttctcaagcacaaagggctcaaagcacacagaggacttgctgttcctgacagactttgtcaaggacagaaaggaacttacagactcacacactgatccacaaagaaaattagaaactcaccagaccctctccattttaagggaaactaaggagggtggcgggagatgggacaggaaatgactgcccaagtataatgcaacataaactagtatttcttgtgaaatgttttcttatcctcaagtctaaagacatggcacgtgcgtgcctgcgtgtgtctctgtgcatgcacttgcacttgtgttcgcagtggtgtggagggtaggaaggactaatagcatgattgaaatgatcatattaactagattactctttgacatacttggattttgacttgtcttctgattggaagtttttcttcagcatctttggcattaaagaggcttgttttgggaagtaacatttattggacccctagcgtgtgcagcatgggctgctgctgtgggccagagaggctgtgtcaggcaccagctcacaggatggctgcagaggcaccagcttcagtgcagtgcctcccgtgccaggtaccttcatataggtctcgttgaacttacagtccagacctgcagaaagtgtatgaccaagtgctgagttaggcagtgcaggttatggatgctgtagaattccaaggaactcccagacaaaggtatgaatgtgcttgcttctgaaaaacactgacagtacttcccaccttgctgagatcaaaagtgaagtctcagagctgggaggagtatgcaggggaccatgggaagggattgggttttctttttttgaggcagtgtctcactgtcacccaggctggagtgcagcggtgcaatcacaggttactgcagccctgacctcctgggctcaagcaatcctcctgcctcagcctccttagtagctgggatgacaggcatacactaccacgcccagctttttttttttttttgaagacagagtctcactctgttgcccaggctggagcacggtggtgcaatctcagttcaccgcaacctccacctcccaggttcaagcgattcttgtgtctcggcctccagagtagcacaccaccacacctggctaatttttttaaattatttatttatttaagtagagatggggtttcaccatgttggccaggctcatcttgaactcccggtctcaagtgatccactcgcctcggcttcccaaagtgctgtgagctaccatgcccggccttttttttttttttttttttttttttaagaggcagtgtttcattccgttaccccagctggtgtccagcacctgggttcaagggatctgcatcaccctgccaccagcctcctgagttgcaagctgccacacccggctcaggagtcagtttttcagctagcttctccaagacaaatatcattatccctttcatagttaaaagaatgtcactagtcagctgcaagtgcttttctgtttattgggcacagccatagaacagctttaattatgcccagtgtagggattcagaaagtgaatcagagaagcaaattggtccagggactgtttggtagtccagtgctaatagaactttctgtagtgatagaaatattccgtatttgagctgtggctctaaacaatagtcactagccatgtgtggcaactgggcacttcaagtgtggctagtgtgacagaggaactgaatatatatatatatatatatacatatatatatatatatatattttagacagagtcttgctctgttgcccaggctagagtgcagtggtgtgacctcagctcattgcagccacaacctactgggctcaagcaatcctcctaccccagcttcccaagtaactgggaccacaggcatgtaccaccatgcctggctgatttttttattgtttgtagagtcagggtttcaccacgttgcacaggctggtctcaaactcctgggctcacatgatccacccgcctcagcctcccaaagtgctgggattgcaggtgtgagccacctcagctggccctaagttttaattttcatagccacgtgtggctagtggttaccctatcggatagggcaagttggaagaagataggagcttgctcttgcccagacctcctggctcccagcacagtgtgctctgatgctctctctgccttttgtcacaccagtgcagtggacatcatggggaagacagggacctggcccagagaccttacctggtgtggaactcatctcctttccctccccctggcagggctgaaaaactgggtggtagctgaagacgtggtgtttaaacctgtggctgccccctggaacccggagcactggctacagcgcccacagctgactcggcaggtcctgggaaaggaggacctgacagctttttccttgggaagccccctaccccgctacctctacctggctagcaaccagactaatgcgtggggtcaccagcgcgggtaccgaatccagatccacagcccccttggcatacacatacccctggagagtgacatggagagggccctcagctgggggaggtgaggagggccctggcctgggtggaaggaaaggacagcccctcccctgccccagtccttggagacaaactcccttcccacggctaccattcatccctgtacctcccctcaaacccaagttagatacacggtgggaaatggtctcacacagaatcggatctaagggactcctgggccagtaaaggcacttgacatttcccaaaaccaccttcttatgattcctggccagataccagcttgtggtgacccagagaaaggaggaggagtcacagagcagtagcatctatcaccagaatgacatctggacacccacagttacctttgctgacttcatcaacaatgaaaccctcttaggagaggttggttgccctagggacataggaaagggacacctgtgggcatggcatcttggctgcccagcctctggccaaaggttagagggaatggctgatttccagttcgcagattcagaggccatggagttttctgatgaccaacacaggtcatccctcctggggtgagattagctctgggacactggctcccccctctccccgcacagctgcttacatggattgctccacgtgttgtatgggcatgaggctggggagagtggaagccaggctgagactggaggctgggattgtgactgaagggtggttctttgggtcacgcttccatagtcctccagctcctccttcttcttgcaggatctggtggcttgggtcacagccagcttcctgcacattccccatgccgaggacatcccaaacacagtgactctggggaacagagttggcttcttgctccgaccctataacttctttgatgaggacccctccatcttctcccctggcagtgtctactttgagaagggccaggatgctgggctctgcagcatcaatcctgtggcctgcctccccgacctggcagcctgtgtcccggacttaccccctttctcttaccacggcttctagtcctgagggtgtggcgggcggcgtggttaggcacatgtacttttccctgtttctactttctattctccgtgtttttatcacacctgctccccagattcccaccccctcaatgttcctctcacacgaaacccccatcagtccctttggttaattcttacttcctgttcatctctaaagtgttaaattataaaaatgatttttaaatattcaaagaaaaatatcacaaatcctactactcagaaataggtggtcacattacatcagacatctctttatgcatgtgcattcaaaaggaagagtagatagaattttgtaaaacagatgttgtatgtaatttataataaaaagtattagaggaattttacttgaatttattgtttgacctgttaagtatctagagtcctctggagaatactaaggagtctggccagggaaattagcgctgggggccagagggcaagggggatagacctggccaaggaatgtcatttggaaagctaaaggggcagggggtgggggtctttggaaggaaaacgatagtttgaagttacaggaaaatatctggccctgactaagtgggggactggggaagaagctgggctgaggtcaggagaggctgctctgcacagatcctgctccttcccagtgctgcattatcttgaaattttccttccccttccccctagccccaactctccccaactccaaccctgacccagaaagtagagtgatttggaggctggaagacaaaaccatgtaaggtctgtggaaatcacagctgttcagacccgcctccaaccccggccaccccgcccccttgccctagccttcctgtgtccttcccacccttagtcccaggcatctgactaccgggaacctcagccagagtccgggagccccccaccccgtccaggagccaacagagcccccgtcttgctggcgtgagaatacattgctctcctttggttgaatcagctgtccctcttcgtgggaaaatgaaccagaagacaatcctcgtgctcctcattctggccgtcatcaccatctttgccttggtttgtgtcctgctggtgggcaggggtggagatgggggtgaacccagccagcttccccattgcccctctgtatctcccagtgcccagccttggacacaccctggccagagccagctgtttgcagacctgagccgagaggagctgacggctgtgatgcgctttctgacccagcggctggggccagggctggtggatgcagcccaggcccggccctcggacaactgtgtcttctcagtggagttgcagctgcctcccaaggctgcagccctggctcacttggacagggggagccccccacctgcccgggaggcactggccatcgtcttctttggcaggcaaccccagcccaacgtgagtgagctggtggtggggccactgcctcacccctcctacatgcgggacgtgactgtggagcgtcatggaggccccctgccctatcaccgacgccccgtgctgttccaagagtacctggacatagaccagatgatcttcaacagagagctgccccaggcttctgggcttctccaccactgttgcttctacaagcaccggggacggaacctggtgacaatgaccacggctccccgtggtctgcaatcaggggaccgggccacctggtttggcctctactacaacatctcgggcgctgggttcttcctgcaccacgtgggcttggagctgctagtgaaccacaaggcccttgaccctgcccgctggactatccagaaggtgttctatcaaggccgctactacgacagcctggcccagctggaggcccagtttgaggccggcctggtgaatgtggtgctgatcccagacaatggcacaggtgggtcctggtccctgaagtcccctgtgcccccgggtccagctccccctctacagttctatccccaaggcccccgcttcagtgtccagggaagtcgagtggcctcctcactgtggactttctcctttggcctcggagcattcagtggcccaaggatctttgacgttcgcttccaaggagaaagactagtttatgagataagcctccaagaggccttggccatctatggtggaaattccccagcagcaatgacgacccgctatgtggatggaggctttggcatgggcaagtacaccacgcccctgacccgtggggtggactgcccctacttggccacctacgtggactggcacttccttttggagtcccaggcccccaagacaatacgtgatgccttttgtgtgtttgaacagaaccagggcctccccctgcggcgacaccactcagatctctactcgcactactttgggggtcttgcggaaacggtgctggtcgtcagatctatgtccaccttgctcaactatgactatgtgtgggatacggtcttccaccccagtggggccatagaaatacgattctatgccacgggctacatcagctcggcattcctctttggtgctactgggaagtacgggaaccaagtgtcagagcacaccctgggcacggtccacacccacagcgcccacttcaaggtggatctggatgtagcaggtaagacattttggtggggagaaggcttctggaagaagggctgaaaagttgtttccattagctttgggttttatgtagattatcccagaaaggaagacgtggatttttgtacttccccttttgctggatgggagagagttggctgctgagttttatttggatcttagctcactggctgggtgcaaagctgcagccttcctctacgtgacctcatccaaagatcttgggaaatggccgagctcagggaggaggcaggatttgggctaacagtgtccccattgccctcttctctcccttgtacttatatgggctctgctgctgggagcagccttctgtttgtcagctcagttctgtgtctggcctgtggtggtggtgttttggaggatctctttgcattctaccacgtccctggcatgtgcaggtcagtcattccaggttgtacatttcctttggagatggaccctcctccctgattttccttctttctctgggcacaattcacctaagtgtgaggggtcacatggatcccgtggagcattctggatagatcctggagtctggtcacagagagagccaaggctacatgatggcttggagtcttcatctttgtcttttcactgtctttccccacattgagtcagtcaccaggtgtttttttttggttttgttttattttgttttgtttctgttttgcacctgcagtatctcggcaggtcagactgtcatgccgtgcaggtgccagccctctctctgctgtttttgctcttgttgctctcagagccaagagccactctgcacccagagggcctcccatccacaccagcctgccctttactcagctctcactttcgtcatcacctgtgggatcctgtctgcagaaccccctcaaaactctttccttcacggtgcagctccaccctgccttgctgtgctctgcacagctacacccaaattctccatgtccctggacacgcacttcacatgttacagtcaggcatcctcctgtttgcttatgctttgtctctgcttagaatgtccttccatatcatcttttctggtaatgtcctttaaggccaggctgaaaagttgcccggaagggcccccttttcctgcctgcaactgtattcctgtgatccggaagttgcctaggccatgctcctctcacaggacaggccagtcagtggtttgtctgtctgcgtggaaagcaagagggtaaggatgatcattcatctctatccccagggacgagtacagtcctctctgctaatgaatgttgaaagaatgaatgagtgaaatggaatgaactccctgatgaagtattttaatttacaggtcaacagctttggctaaaggattggaggtatcctggggagagggaagagaaggaggggcacactcagttctgggctgctctttggcccccactctgaagccagatgggggcagagtccagaggggccagggcagttgcctgacaggccctcccctatcccaccctgagcaggactggagaactgggtctgggccgaggatatggtctttgtccccatggctgtgccctggagccctgagcaccagctgcagaggctgcaggtgacccggaagctgctggagatggaggagcaggccgccttcctcgtgggaagcgccacccctcgctacctgtacctggccagcaaccacagcaacaagtggggtcacccccggggctaccgcatccagatgctcagctttgctggagagccgctgccccaaaacagctccatggcgagaggcttcagctgggagaggtgagtggcgggcagtcagagaggaggggggcagtgagagtgggaaaggagtgttggcggacactcagctcacactgtaggtgaggggagagctctctcaggaaggcttttcttttccttttttttttttttttttgagatggagttttgctctgttgcccaggccggagtgcagtggagcaatctcactgcatcctccgcctcccagtttcaagcgattctcctgcctcagcctccccagtagctgggattacaggtgcacgccaccacacatggctaatttttgtatttttagtagagatagggtttcaccatgttggccaggctggtctcgaactcctgacctcatgatccaccctccttggtctcccaaagtgctgtgattacaggcatgagccacaatgcctggccaaaggtttttctagttatccaaagaaaccatgatgggcacattttccccttggaggctaaagcccaggagtgagaactctcttctgttttggatgggagaggggttgtactgttaaatggctggggataaacaggaggacttgaccccccttagggtgacgtcggggattctgtagcgccgagtcagttgtgtgactgcaattggggaagctgagctctgagcactcagttccctttcatcataatcaggcagcaggatggggtcaatggccatggaggcctgaccagtgcctccctaggtaccagctggctgtgacccagcggaaggaggaggagcccagtagcagcagcgttttcaatcagaatgacccttgggcccccactgtggatttcagtgacttcatcaacaatgagaccattgctggaaaggtcagctggccggggtagagggtacaggatgagccttgctttctcttgggagggtccctgaaaaccacctgcacttctcaggggtggtgctgattcctgccttctgcacttcagtatatctgatcattatcctttgagggaaccttcctgagctgggtgtccatatgcagacactgagtgaggccctgggcctgtccttgagatcttagagccctcttagttccagtttcatggactgagtcctttccaggctccaggactcaggagggatggaagttaccagggaaaatgacatctcctgtatctgaagcttctcccattcctgacttgatgaatttcacaatgttggcctggttctgcttcccaagcgctggttctttttcctccacccttctttcctcagttgtggggaactcttggagagttaggggaagaggagctgaagtagcctgtgggtgtcaccctctgggggtagataggcaatgggcgatatgatgggaaatgtcagagatggaggctgcaagccagggacagggaagcaggtgttcctaatatgaaatggactacttatgctttgactcctacccagcaggaaaaaatgtttaaagactcatgatccttgggctggtgagctgaatccctaccagggcatgtcctcagcaaagccagacctcgtgatcctctttcttctcccctgctaggatttggtggcctgggtgacagctggttttctgcatatcccacatgcagaggacattcctaacacagtgactgtggggaacggcgtgggcttcttcctccgaccctataacttctttgacgaagacccctccttctactctgccgactccatctacttccgaggggaccaggatgctggggcctgcgaggtcaaccccctagcttgcctgccccaggctgctgcctgtgcccccgacctccctgccttctcccacgggggcttctctcacaactaggcggtcctgggatggggcatgtggccaagggctccagggccagggtgtgagggatggggagcagctgggcactgggccggcagcctggttccctctttcctgtgccaggactctctttcttccactaccctccctcgcatccgcctctgagccaggagcctcctgaccctgtgatgcctgacacaggggacactgaaccttgttgatgccagctgtactgagttctcatccacagaggccaggcatggcccagcctggagccgtggccgagggcttccctagatggttccctttgttgctgtctggctttcccgaatctttttaggccacctccaaggactctaaaagggggctattccctggagaccccagagtagggttgccagtcctgcaagtccatagctgagctggaaaggatgcttctgctcacattccctctcatccaggtcctttccttctcgtcttcctctctctcacctacttcctcctcctcctcctgttcctgccttctcttctatcctgcaatttctcccgaatcctgaggggatatccctatgtcccagcccctggtactcccccagccctcagttttcagtcaagttccgtctcctctccagccctatggaagtctcaaggtcacgggacccctaatcagagtggccaatccctgtgtgtcgttcccttgtgtctgttgcttattgggagtaggagttgctcctacccctgtcctggggctgggtgtgtttcaggacagctgcttctgtgcatttgtgtctgcctgcctcatgctctctatagaggaggatggtcatcgtgacagcagcagctcaagttagcatttcaagtgatttgggggtgcaatgataatgaagaatggccattttgtaccagggctctgtattctgcaacagcctgtttgggaggctggagtggaaacaaagggtgggcatcaaagatgagaagccaaagcccctacaactccagccacccagccaggaggggctgtccaatcacattcaggcatgcgaatgagctgggccctgggtgaggtgggggtctggcctagtggggaggggcctggcctgggtggggcagggcctggcctggtccaggcttgggctccattcccatcactgctgtccctcctgaggtctggattggggatggggacaaagaaatagcaagagatgagaaacaacagaaacttttttctctaaaggactggttaaatcaattctgatacagccttacaatacaatagtatgcagctaaaaaataattgtatgtctttatatactaatatgtaataatcttcaggtgaaaaaggcaagccacagaaatgtgtatagcgcacttcccatttgtgtttcagaaaggagtagaatataaacacataattgcttatgtatgcctattcagaataaatgggtaacactgattacttttgggaggggaaccagtaggttgaggacaggagagggaagggtcttaacacttacacccttttgtacattttgaattttgaaccatgtgactgtattacctattcaaaataaacaataaatgggcccaaacaggaattgactttttttttttactgacacttttttttttggtggggaacaggttgggggtagggtaaagtgggttaaggaatgggaccagggatgaaattttctccagttcttgagatccagagaagcaggtgtggcctctagtaactccttttgccttctcatgcttgtacatctttgaggaaatgttaaacctcggttaattccctgacacacacacaccccaccctttccctctctcctgtcttctctctctctcaatgaggggcaatgagaagcagtgaggaggggtgacttctgcttgccagaagcccaggccagggcaggaggtaaagtgcaggaaacattctggatgccactcagcttctgaccagaaaaagaccagaatatgttctgggagctccagcatcatggaagcttctgctaccttctgttctgccccaagcccaagttctgccgtaggtcagtggaacaatggatggggaggaatcaatgagctggagagaaattaggctctaaagaacaggaagaaagccttcagtaaggagcagggggccttcaatggcatagtaattcataatatggccaggagtggaggcaggagtgaaggaggacagggagagatggagagaagggcagactcaagacagagatgcaggagaaagggggatgctgtggcctgctgggacactgatgcaggcttcataatccctctgacctgaggacttgaactttcttttttttttaatttttaatttttgagatggagattcactcttgtcacccagactggagtgcaatggcacgctctcggctcactgcaacctccatctcccgggttcaagcgattctcctgtctcagcctcctgagtagctgggattacaggtgctgccaccacgcccggctaattttgtatttttagtagagacggggtttcactatgttggccaggctggtctcgaactcctgacctaaggtgatctgcctgccttggcctcccaaagtgttgagattacaggtgtgagccactgcacccggcctgaacttctcatttcaatgcatatcctcttgtccccacctccttacggctctttcttatggctacttgcaccatcatcagtgctgggggaaggggagcaaaggaattcagatatccacccccgcaccctcaccatcttgttcactggaatttagttgccttgaaacccatctccagaccaaagtgtttgtatgtgttgtgtgtgtagttgtatgtcaattctcacaagcttttatatgaaaacgtgactggttgtgtctgcttccttatatctcagcatggtgatgatgccacctgccccaggccccagatgaggggaggcagaatggacatctagattgttagaacatcagttcagctcgggtcaggagggccgcaaggtggacctccagccccacaccccaatccaatctcttccttagaccacagaagttgtctggagtcttggcttcagacttgtggtcaattgtctaggagtgattactggctgaggatgtcaggttctgaaggaactggtgctgccaaggctcagatcttcaggacttggggcccagtggcctgagataaaggagttggacaagggaatccctgaggcttgggtcagagggcatgactaggacttctccaggaatgtgaacatggcaaccccctgtgaggacatgaggtgtgcccactcgcctcacctcttttattttttttattttgagatggaatttcactcttgtcgcccaggctggcgtgcaatggcatgatcttggctcactgcaacctccacttcccgggttcaagtgattctcctgccttagactcctgagtagctggtattacaggcacctgccactacgcccggctaattttgtagttttagtagagacggggtttcaccatgttggccaggttggtctcgaactcctgacctcaagtgatccgcctgccttggcctctcaaagtgctgggattacaggtgtgagccacagcacccggcccccagtgacttcttaaacacaaaatcaacaggagctcctggccgcctactttctggacctctcggtggcgtttgacaacaccaactgtcctccctcttggaaccctctcccatcttgactctcccacattgtccccttttcatccatatttgctccttctcagtcttctcaggctccttgacttctgctccccctacctactcatggagccccaagctcttgccttttctagggttctgtccttggtcctcctttctcctctctccagaagtcctctgtgggtgatctcagcctttctttctttctttttttcttttcttctttctttttctttttttccccccttaagaaaaggtcttgctctgtcacccaggctggagtgcagtggtaccaccatggctcactgcagcctcaacctcccagactgaagcgatcctcccacctcagcctcccgagcagctggaattacaggcgtgtgccaccatgcctggctaattaaaaaaaattttttgtaggccaggcgcggtggctcatgcctgtaattggagcactttgggaggccgaggcaggtggatcacctgaggtcaggagttcaagaccagcctggccaacgtgatgaaaccccatctctactaaaaatacaaaaaattagctgggcatggtggcgggtgcctgtaatcccagctactccggaggctgaggcaggagaatcgcttgaacctgggaggtggaggttgcagtgagccgagatcacatcactgcactccagcctaggcaacaagagtgaaactttgtctcaaaaaaaaattttttttgtagagaccatgtctcgctctgttgcctggtctcaaactcctgggctcaagtgatcctcccacctcagcctcccaaagtgctgggattacaggtgtaagccaccacgcccagccagcctttcttactttaactgtcaatatttgtcattggccaaatctctttctacacgtatgtttttggtgttttgttttgtttttgagagaggttctcactgtattgcccaggcttcagtgtaggggtgcaatcttggctcactgcaaactccaccctgtgggctcaagtgatcctcccacttcagcctcccaagaagctgggaccacaggcatgcaccactatacctggctaattttttatatttttggtagatagggttttgccatgttgcccaggctggtcttgaactcctgagctcaaggaatctgcccatcttggcctctcaaagtgctaggattacaggtatgagccaccacgccagcctatatatatatgtattttttaagttattgtagagatgaggccttgctatgttgcccagagtggtcttggactcctgggctcaagccattctcctgtctcttcctcacaaagtgctggaattacaggcatgaggcaccacactcaaccaaaataaatcttttctctgttttttctttttttagtgacaaggtcttgctctgtcacctaggctgaagtgcagtggcacaatcatagtttattgcagccttgaactcctgggctcaagcaatcctcccgcctcaccctcccaagtagctaggatgtgcctggctaatttttttttaattttttgtagagatctctatattgtccaagctggtcttgaactcctaggctcatgtgattctcgactcttggcatcccaaaatgaagggattacaggtgtgagctgctgcacctggtcaacattagttgtctttttttttcttttgagacagagtctcgctctgtcacccaggctggagtgccgtggtgtgatctcagctcactgcaacttctgcctcccaggttgaagcaattctcctgcctcagcctcctgagtagctgggattacaggtgcccaccaccatgcccagttaatttttgtatttttcgtagagatggggtttcaccatgttggtcagtctgttcttgaacctttgacctcaagtgatctgcccatcttggcctcccaaagtgctgggattacaggcgtgagccactgtgcccagccccaacattagttgtcttaatggcatgttcttagccaagagctggaggtaacttccccgctattgaccataacctaccaaaggaccagacacaagttccctggctgggatggattgccttgtggctaggccttgacattagattttatttcctttatcctaaaggtcacacaactgttgcaggacacagaggactagagagactagtatgggtgaatacaggaggatatttattaggtgtgtaccagctcagtggactcacagctaaaaagctgagcactgaacaaagacagagtttagcttatacaggctagtacacagaaacaggacaaaggcagtaaactatgtagtgacaagtcacataatctatagcataactgttgacttggcataacttgtaaaacagaaacttataaattttactgaatacaagtgttggcaaacatagtcataattaattatttaaaggggagacagcaaaggaatttgttcttcttttaactttgctcgggggtgtctggagcctatttctgcaggctaggtcaccatgacctgtctatagccttgcctacagtagaagaaaacttctgtttttcatttaacctttacttttcttggagtgaatacatacagtatttattttctttaaatttctgattcacaacctgtttccaatgaccctttcctgccttagttacagtaattccattgtctgtcttgacttcaagaagctttctagttcttcatctccatgttactgctcattgatgggaatattgggtgtgagttttactctccaacattcgggcgtaagtattaaatgtcacttttctttttgtttctttttctgagatagcatcctcctctgttgcccaggctgaaatgtgatggcatgatcatgccttacagcagctaattcttttttttttttttttttttaaacttttttgtagagatgtgggtcttgctatggtgcccaggctgatcttgaacttctgggctcaagcaatcctcccacctcaccttcccaaagtgctgggattacagatgtgagccaccatgcccggttaccttcctttctttcttttttctttctttcttttttttttttttttgagacggagtcttgctctgtggcccaggctggagtgcagtggcatgatctcggctcactgcaacctctgcctcccgggttcaagcaattctcctgtctcagcctccccagtagctgggactacaggcgcctgccaccacacccagctaatttttgtatttttagtagagacagggtttcaccatatcggtcaggctggtctcaaactcctgacctcaggtgatccgcccgcttcagcctcccaaagtgctgggattacaggcatgagccaccgtgcctggcttgcttgcttgcttgcttgcttgcttgcttgctttccttccttccttctttctttctttctttttcttgtctttctctctctctcttccttccttcccttgccttccctttctttccttccttcctttcttccctccttccttcttttcttccttcctttcctccctccttcccttcctccctccctctctctctccttccttccttccctctgtctctcctttcctttccttcctttcccttcccttctccttccttccttccttcctcctttctttctttctttctttctttctttctttctttctttctttcttttcttctttttctctcttcctttctttcctcttactttttttctgagatagagtctagctctgtcacccaggctggagtgtagtggcacaatcttgcctcactgcaaactgcacctcccaggttcaagtgattcttgtgcctcagcctcccaagtagctgggattacagacgtgggccaccacgcccagctaatttttgtatttttagtagagacggggtttcaccatgttggccaggctggtcatgaactcccaacctcaggtgatccgcccacctcagcctcccaaagtgctaggattacaagcatgagccaccactcctggtctttttttttttaatgttcaataaccagctctgtgccctcagctactcggctggcaggaaattaaactccaggcatgtttgttgagggtgcttatctttagggttaggtaagactctggaatctgggaattttggggactgtcagctagtcttcagtggacagtgatcactgctgttaaactcactttccactgccttgccaagtcttgccaaggcggggacagaggaggggcctaggcatgagttccactctgaggctatcacttccctaaggccttgctgggcgggagagtgggctctagccattctttccctccatacacacacacacgcatacacacacagacagacacacacacacacactccctacttgtgaatcccacaaaattccccgaatatctgccctcactctgtaggggatctctcaaaaaccttcctccttcccaagttgatccagggagctgtcatctgtaatccaagagcttagagaggctgcagcgggaagactgcttgagcccaggaatttgaggctgctgtgagctatatatgacatcactgcactccatgcacgctagcctgggtgacagagcgagaccatgtctcaaaaacaaaacaaaacaaaacaaaacaaaaaaaaccaactttttttaaaacagtttttttcatgaagagcttctacagagcataaaaaccagatcagcaagagaaaatgtggttcttggtttccctgaggacaagaagggctcacatgcctggagggaggagttgttatattgaaattccatcccgcaggaaaggggagccctacttttcttacagccttgaaatgagccccactacttctacagctttaaataacaagaggccgggctcggtggctacgcctgtaatcccagcactttgggaggctgaggcgggtggatcacttggggtcaggagtttgagaccagcctggccacatggtgaaactccatctctattaaaaatacaaaattagtcaggtgtggtgactcgcgtctgtaatcccagctacttgggaggctgaggcaggagaattgcttgaacccgagaggtggaggttgcagtgagctgagattgagccactgcactccagcctggacgacagagcaagactccatctaaaataaaataaaataaagatacaaaaagtagccgggtgtggtggcatacgcctgtaatcccaactactctgcaggctgaggcaggaaaattgcttgaacctgggagacggagcttgtagtgagctgagattgcaccattgcactccagcctgggcaacagagcaagactgtctcaaaaaaaataaagtcaaataaaagaacaagaggcaggaaaaccaggcaagtttccttatcaaaatacaaccaatggcataaacatttctggatagcctgacccttctggtgttgatttatctggagggtcctggtctctgtgtggtgctgccagtcaagaggaatgatggatattgtgaaaaacccaagggcagaggggtcgggggtggagctagaggggactaggaatcaggtcgtgttcaggaggtggggcagagttaaactttgactttaaatgacccacataagcctccgtcctcctgttccaaataaaacaacgcactcagggtcagggtcaatgacctggtctaggtttccaggtgtctgtctcactgtctttctgcaatgactaccttgctgaaaacatgcgccacgcgtcttcatgatcttacctcctctgcttactcccctcctccccaactcccaccaaataggctgatccttggctgttccctgcttgtgctgagctgtttcaggtttctgtgcctttgctggaatatccttcctcttctctgccaggtgaatgcatcatcttcaaggtcggctcgaacatctcttcctgagaagtcttcctagatgtgtccaggttggagaggattcttccccaggtacacgagggaagcacatcccccttctggaaccctcagtctcttccagttcccctcaggacctggctgcccaaatgacagtggctttccacatgtttgtcacctggaaaagaagccgctcagccattggctgtgaaggacagaggtggcttcactctccatgtcggcaccattttggaaaaggattttcaggcccgagataagtccacagccagtttcccagccccacctgacctctgccctggcctatccctcagtccagtacaaggggaggcatgaaggtctcggttatactctggttcctgcccccacactcacccccaccccaatgaaccaggcagcttctagcttgttctgcaccctgcacactcccctacagtgacttagggcacttggggcctccacaaagctgacctggctcagcctctcagccccccagctccctgctagatgctttgctttctcatcattaccctcaggcttccctcaggctgctgctaggattctagtggatggatggaggcaggagagagaggtgggaggcagagcctggaggacatcaaaaactagaggagggaaggagggaatctggctgtggaggtgtggccaggtgattttcccttgcagccttgcagccaggagaaaagttccacctggagggaaaagaaaggagagccgcaggacagtcggcgccccccacttcctcttgcaccttgctagctcttatctccaaaacacacctctctgcctacttggttcattgaccctgaccctgagtacgttgtttgatttggaacaggaggacagaggcttacgtgggtcatttaaaatcaaagtttaactctgccccacctccttaacacgacctgattcctagtcacctctagctccacccctgacccctctgcccttggggtttttcacaatatccatcattcctcttgaccagcagcaccacaccaggaccctccagaggctgtgagaaacatcctgcacccaggtcctctctatctgtttatcattgtctattttgtattctgcattcagaaccaagagcctgaagacgacccaggagctttagctatggctgtcttcattattttgtccctgtttagtgttctggtgacaggcatgggtgaaggtggggctgggagtgagaaaggaggtgagagggaatgtaagctgaaccagcttccccattgcccctccgtatctcccagtgcccagccttggacacaccctggccagagccagctgtttgcagacctgagccgagaggagctgacggctgtgatgcgctttctgacccagcagctggggccagggctggtggatgcagcccaggcccagccctcggacaactgtgtcttctcagtggagttgcagctgcctcccaaggctgcagccctggctcacttggacagggggagccccccacctgcccgggaggcactggccatcgtcttctttggcaggcaaccccagcccaacgtgagtgagctggtggtggggccactgcctcacccctcctacatgcgggacgtgactgtggagcgtcatggaggccccctgccctatcaccgacgccccatgttgttccaagagtacctggacatagaccagatgatcttcgacagagagctgccccaggcttctgggcttctccatcactgttgcttctacaagcgccggggacggaacctggtgacaatgaccacggctccccgtggtctgcaatcaggggaccgggccacctagtttggcctctactacaacatctcgggcgctgggttcttcctgcaccacgtgggcttggagctgctagtgaaccacaaggcccttgaccctgcccgctggactatccagaaggtgttctatcaaggccgctactatgacagcctggcccagctggaggcccagtttgaggccggcctggtgaatgtggtgctgatcccagacaatggcacaggtgggtcctggtccctgaagtcccctgtgcccccgggtccagctccccctctgcagttccatccccaaggcccccgcttcagtgtccagggaagtcgagtggcctcctcactgtggactttctcctttggcctcggagcattcagtggcccaaggatctttgacgttcccttccaaggggagagggtggcctatgaagtcagtgtccaggcggccttggccatctatggaggcaattctccttctgctctacgaagccggtacatagatagtggctttggcttgggccacttctccacgcccctgacccatggggtggactgcccctacctggccacctacgtggactggcacttcctttttgagtcccaggccgccaagacaatacgcgatgccttttgtatatttgaacagaaccagggcctccccctgcggcgacaccactcagatctctactcccactactttgggggccttgcggaaacggtgctggtcatcagatctgtgtctactatgctcaactatgactatgtgtgggatatggtcttccaccctaatggggccatagaaatcagactccacaccaccggctacatcagctcagcattcccctttggtgctgcccagaggtatggaaacaaagtttcagagcacaccctgggcacggtccacacccacagcgcccacttcaaggtggacctggatgtagcaggtaaggcatcctggcagaggcaaaagtgctggaggggtgagctgaagtctccatgcctagctttaaaagttttcgttgggctgggagcagtagcttatgcctgtaagcccaacactttgggagactgaggggggtggatcacttgaggtcaggagttcaaaaccagcctggccaacatggcgaaatcctgtctgtactaaaaatacaaaaattagctgggcatgggtatgctgtaatcctagctactcgggaggctgaggcaggagaatcacttgaatctgggagtcagaggttgcagtgagctgagattgagccactgcactccatcctgcgtgactgaacaagactttgtctcaaaaaaaaaaagtattccatgctttaaaaaattacctctgtgattatagaatttattatattgtatactatgtataaatatgatatattgatataagtatttagatttctatattcaaatgttatcataatgtacctacgttttgccacttctgttttttcatataacaacattattcaagcaagcaacaaaaatgtatgaatgcacacttgtgccaagcacccaactatgcaatttaacaaaagaaacaacattgttgctctcagatggtttacattctttttttcttaccttttgttttttcttttttcttttttgagacagggtctcactctatcacccaggctggaatgaggtagtgtgataatagctcactgcaatctccaactcctgggctcatgtggtcctctcacctcgatctcccaaaatgctgggattacaggtgtgaaccaccatgctcagcccttatcattttttcgtggtgagaacacttaaaatctactcttagcagttttcaagaatatataacatattaactgtagtcaccatgttgtacaatagatctctttggggtttttgttgttgtttgaaacagggtcttactctgtcacccaggctggagtgcaatggtgtgattacagctcactgcagcctcaacttactgggctcaagcaatcctcccacttcagcctcctgagtcactgggactatgggcacatgccaccatgctcaggtaatttaaaattttttttatagagatggggatctcgctatgtttcccaggctggtcttgaactcctgggctcaagcgatcctccctcctcagcctcccaaagtgctgggattacaggcatgagccaccatgcccagtccaatagatctcttgaacttctgaaattttttattcattgagctacatcttcccaactccaccctccttaaggccctgataaccaccattctatttcctactgctatgagttcaactttttttagattccacatataagtgagatcatatagtattgtcctgctgtatctgacttatttaattaacataatgtcccctaggttcatccatgttgttgcaatgagattttattcttttaaggctgaatagtatttcattatgtatatataggacattttctttatccttaaaattttttccttattccttatacatttattaattggaattttccataaggaagagttgtccttcctttttatttctgttttcaattatttattcaaattgtatagactcatggttttttattgtactctaagggttataacccagtacttcatttattttgttccttacatttttccaactttggccattgggagatccttcagattagttcctatgtccttttcacatacctccacacgtttttgagcacttctttactttctggcacccaaaaatgtttcaatttcatctggcattttccctgcttctaccctggaatcaaccttgtctccagggagatcgggttcactttattggagaatggtatttagaaaccaatatctgggcaccaagtgtgctcattattactgggatgtcattgcttttaggccctctcagtggacttagctagaaaatttaagcatatattccaaccaacccatacacacacatctatctttatctctgttattaaatgatgacaacttttaaaacacttggaacagtgcctgacacatagtgggcccttgagaaatactaggtattgttgtgattagccacaggagcctacttgtgtgtgtggaccataaagaactcttagtctctggccgggcacagtggctcacgcctgtaatcccagcagtctgggagactgaggtgggtggatcttctgaggtcaggagatcgagaccagcctggccaacatggtgaaaccccgtctctattaaaaatacaaaaattagctgggcatgctggtgtgcacctgtaatcccagctacttggaggctgaggcaaaataatcacttgaacctgggaggcagaggttgcagtgagccaagatcatgcgactgtactccagcctgggcaacgagagcgaaactctgtctcaaaaaaaccaaaaaaacaaaaaaaactcttagtcggcaattgtcacctaagggtggaaacactgggatatggagtaggggcagtgaatctacaaaaggaaactaagggtttgctgaatcagtctctcctctctcctggtctttggaaggtgcagagggagctaccagcatgttttgatttattgctccttgtctcagatcacttaacttgactcctaatatgggacctagttagactcaaataaaatcattcagactccaaaagttcaggaaacagattgtgtcttaagccccgctccctgctccctgccaaatttcaaactgcgaaaggtatctccaagccccaacagcgtcgggcccagtattggttttccttccccttggtccccatgtctgctgttctgttgtggtgtctctctgtgctgtcttcctctatgtgctgatgtgtgggcagtgtaaggccagactaagaaccaggtccccagcactgccatgatattaaccgtgtgtccttgctgaccaaccagggtacattattgaatgctctaagactcagttgtcccatctgtaagatggagacaatgatagttcctcctttttgagattgttgtagaagtgaaagcatgaatacacagaaggcactcggcatgctccctacacagctccttcaggttgagtcaatgtgaggcttattttcatgataaggcagtcctggcaatgccacagggcttcacatgtgaggagaagtcttcaggtcagagggagtgccacctgcctattgcccacaggattgttccaacctcaggtaaacaccctcccatgcagcccctcagagggaggacattggtggaggcccagtcgcaaggcatctgggattattaccagagaagacagaagggagaaagccctcctccaaatccctggactgggactatcttggggagagggaagagaagcaggggcacactcagttctgggctgctctttggcccccactctgcccccactctgaagccaggtgggggcagagtccagaggggccagggcaattgcatgactggccctccccgatcccaccctgagcaggactggagaactgggtctgggccgaggatatggcctttgtccccatggctgtgccctggagccctgagcaccagatgcagaggctgcaggtgacccggaagctgctggagacagaggagcaagccaccttccccatgggaggcgccacccctcgctacctgtacctggccagcaaccacagcaacaagtggggtcacccccggggctaccgcatccaggtgcgcagcttttctggggagccactgccccagaacagctccgtggagagaggcttcagctgggggaggtgagtggtcggcggtcaggagggagtggggcaagtagaatgtatgaagggctccacactgctccacctcccacaggtacacacaaacacacacacacattcctgtggccgcaatctgtaggcactcaaaacaaagcctaatgggtgggtggaggaatgctgagatatgaggcattgaagaaaatctaggaaaatgttaatggtagacgctagacttgagtatgtggatgttcactatacaattcttccaatttttctgtatgtttaaaatgttcacattaaaggttggaggaaaaaaacagtgagatgggaacacagatcggagggaggattccctgaaatctaggtatttgagatactgaacttgacctaggatgggaaacaggccatgtccatatgtatggttccaaggcccaggctcaacatcatgctctgatccagatggatggatgagcaacatttctacctgaagcctggtgggccagttgatgtttaaggtacaggacagtggacaagtgggggaagtctgcagaggagagagagagagacagagacaggcaaggagaactggacaaagaatgatacagaggctcaatactccaagactttggggctcatttccccctagtgttcactcttcagtgcagcttcaggcagtgggacagttgacgaacttgtaggtctaataaaaaactcctgtaggtaccagctggtggtaacccagcggaaggaggaggaacctagtagcaccagcatctacaatttgaatgacccttggacacccactgtggacttcactgacttcatcaacaatgagaccattgcagggcaggttagttgcgcggaggggtgagcaggcagctggagaggaggggaggagtcagggggacaagatgagccacttcactgcctcagaagcgagattcctcagggatcttcagaaaccactaacaatgaaactttggccgggtgcagtggctcatgcctataatcccagcactttagaaggctgaggcaggtggatatcttgagctcaggagttcgagaccagcctgggcaacatggtgaaactccatctctactaaaaatacaaaaatgagcagagtgtggtggcgcgtgcctgtaattccagctattcgggtgcctgaggcttgaacccaggaggtggtgattgcaatgagtcgagatcacaccactgcactccagcctaggtgacagagcgagactctgtctcaaaaaaaaaaaaaaagaaagaaagaaactttatgatttcagatttttcctgagaaactaagaacatacaggtgggtgagctgactccctatctgcaaggtcactgtgggaggcagggcatgtcctcagcaaagccagacctcgtgatcctctttcttctcccctgctaggacttggtggcctgggtgacagctggttttctgcatatcccacatgcagaggacattcctaacacagtgactgtggggaacagcgtgggcttcttcctccgaccctacaacttctttgacgaagacccctccttctactctgccgactccatctacttccgaggggaccaggatgctggggcctgcgaggtcaaccccctagcttgcctgccccaggctgctgcctgtgcccccgacctccctgccttctcccacgggggcttctctcacaactaggcggtcctgggatggggcatgtggccaagggctccagggccagggtgtgagggatggggagcagctgggcactgggccggcagcctggttccctcttccctgtgccaggactctcttccctccactgccctccttcacatccccctctgagccaggagcctcctgaccctgtgatgcctgacacaggggacagtcagctttgttgatgccagctgtgctgagttcccatccagagaggtgaggcatggcccagcctggagcctggagccgtggctaagcatttctccagaccactcctggttttcttaacagtttgttttttttaatgagacataattcacataccataaaattcatccctttaaagtatacaatttcagccgggtgcagtggctcacgcctgtaatcccagcactttgggaggccaaggcgggtggatcacgacttcaggagattgagaccatcctggctaacacggtgaaaccccgtctctactaaaaatacaaaaacaaaattagccaggtgtggtggtgggcgcctttagtcccagctacctgggaagctgaggcaggagaatggcgtgaacccaggaggcagagcttgcagtgagccgagatcgcgccactgcactccagcctgggcgagagagtgagacttcatctcaaaataaaataaaataaaataaaactaaatatacaatgtcatgatttttttttttcctgagacagagtttcgctcttgttgcctaggctggagtgcaagggtgcgttctcagcttactgcaacatctgcctcctcagttcaagtgattctcctgcctcagcctcccgagtagctaagattacaggtgcccaccaccacgcctggctaattttttgttttttcttttgtatttttagtagagatggggtttcaccatgttggccaggctggtctcaatctcctgacctcaggtgatccacctgactcggcctcccaaagtgctgggattacaggcatgagccactgtgcctggcccaatttcatgttttttagtatacccacaaagttttgcaaccattgccactaattccagaacattttttatcaccccagaaggaaaccctgtatgtgttagcagtcactttctatttccccccaatccctctccatttctagataaccacttccctactttctgtcccactgggcttgcctgtattctggcatgaaaagattcaaacaatacgttgtcttctgtgattggcttctttcacttagcgtaatgtttgtgagatacatccatgttgtagtgtatgtcagtgcctcacttcttcatggttaaatgatatctcattgtatcaatatatctcattgtgattatccattcatccgttggtgggtatttgagttgtttccacttttttggtcattatagataatgctgttataaacattcatgcacaagttttcttgtggatatgtgttttcacttctcttgggtatatgcctaggagtagaatttctgggttatgcggtaattctatgtttagccttttgggaaactgccagattgttttccaaagtgactatacttttttccttcttttaaaattgtataaaatatatgtaacataaaatttgccaccttggcccaggcgagtggcccacacctgtaatcccagcactttgggaggctgaggcaggcggatcaactgaggttgggagatcgagaccagcctggccaatgtggtgaaaccccatctctactaaaaatacaaaattagctgggtacggtggcatgcgcctgtaatcccagctacttgggaggctaaggcaggagaatcacttgaacccgagaggcagaggttgcagtgagcccagattgcaccattgcactccagcctgggcaaaaatagcaaaacccagtctcaaaaaaaaaaaaaaaaaattggccactttaaccatttttaagtgagagtttagtggcattcagtaaatttggaagctcttttgggccaccttagctctcctctgtcctgttttgtttgtttgtttgttttttgttttttaagatagattctcactcttgttgctcaggctggagtgcagtggcatgatctcggctcactgcaatctctgccactcaggttcaggcgattctcctgcctcagcctcccaggtagctgggattacaggtgcccgccaccacgcctggctaatttttgtatttttaggggagacagagtttcatcatgttggccaggctggtctcgaactcctgacctcaagtgatccacctgtcttggcttcccaaagtgctgggattacaggcgtgagccaccatgcctggactgccctgggtcttaaaggtgaatagggagcctctagagaccagactgttctcccaaagccccagagcaggttccccagtagatgtgcatctcagttttgggccttgaatagcaggtccttctctctgtctgttccctctcatgctgacaaagtcctcctcctctcggttttcctgctacttcagcttctattccctgctggtttttgttttttggtttttgtttgagatggagtctctctctgtcacccaggctgaagtgcagtggtgtgatcccggctcactgcaacttccacctcccaggttcaagtgattctccagcctcagcctcccaagtagctgggactacaggcgtgcgccaccacgtcaggctaatttttgtattttttggtacagacagggtttcgccatttggccaggctggtctcaaactcctgacctcaagtgatcctccggcctcggcctctcaacgtgctgggattacaggtgtgagcccctgcgcctggcctgttccctgctgtttgtagcggaggtcctgtgggagcgtccctgctgcctcaggtcttgtagttccttcctgcattccttacttctggtgtcctcctctgcccctgggctgggttagccttggatctgcaggtactgtcttgtttgaagaaggacaatgcttggttatctccttctgggggacctatgtctctgaacagctttcttcatcttgcctctctgcatttcattgtcataaaaaaatgtttctcctgtcatcttgtcatctgcctatactaataatcctcttacaagttcctgccatttacacaggccatgcggaatatgcatttgtgagggggaaggatggtcaagtgtcagcagcagcccaggggttttgtgggtggaaggatgaaaaagatgaagggtcatctggtcccagggccctggtgacagtagcctctgttactctgcagcagtcagcataggtgaccagaaagtcactgagggtaggcactaaaaagcctcaggagtggccaggtgcagtggctcacacctgtattcccagcactttgggaggctgaggtgggcagatcacgaggtcgggagttcaagaccagccggaccagggctgcccctcatgggctgtggactttggactttggattggcataaataagaaccgggacaattcccaggaagggatttgggggtgggagtaaggtggggaggaggtagggctcaaacaccaagctttctcaggtgtgtcaaggcaagagaaacttacgcagtatgaggcgtccacacctctgctccttcagtgtcttttctgggagtgagatcaagaagagagggtgtcccgtcccagcagatggtgaaaccccgtctgtagcaaaaatacaaaaattagccgggcgtggtggtgcgtgcctgcaatcccagctactcaggaggctgaggcaggagaatttcttgagcctgggaggcggaggttgcagtcagccgagatcgcaccactgcactccagcctgggcaacagagtgaggctccgtctcaaaaaaaaaaaaaaaaaagtctcaggagctcgggcagccaggtggggagctggcccatcaggagttggcatgcaaatgagccacgtgcctcccagcgggggaccagaggccaggtcagggcaacagcctccagggctgcccgtcatgggctgtggactttgtataggcataaataagaaccgggacaatttccaggaggggatttgggagtgggagtaaggtaagggggaggtagggctcaaacaccaagctttctcaggtgtgtcaaggcaagagaaacttacccagtatgtggcgtccacacctctgctccttcagtgtctttcctgggagtgagatcaagaagagaggggggggtcccgtctcagcaggaagcccaggctgcccacccagtctgaggggacggcactgactgggcaggatctggcaagaggggagtttagggtgcagatttgggtccaattcagcttgtgaccagaagagggatcatcaactgggatcccagatcacatggaatcctgtggttcccttgagaactgcctggacccccaggtcaaccatatgggctggaaaggaagtaagttctagcaaaaggaccttcatacaaggactaaagccgtgggaaccacacttcaattcatgactttcagcatatcttgaaagcacttagatagggaaggtttggaaaggcagaactgctactgccgctgctgctgcctcttctttccattttgtgtctcagctcaaagatagagcttctctttaccctctcagcccagataaatatcttgttttgcctttcttgcatttttttttgtttaaagaaatttggaggctgaattgggaggatcacttgaccccagaaggtcgaggctgcagtgagccatgattgcgccaccgcactccagcctgggcaacagagtgagaccctgtctcaaaaaaaaaaaaaaaaggccgggggggggagcataatagtggaaatgctctgtcttgccctgaaaatgaatgctgtagagagccagggctgccactcttggctgctccacaggttgcttctccagatgcggagatggggagaagggacctgtggccccaggctgaggtctgtgaggggcctgctgctgtggctcacttgctgaccaaggaggatgccatacggccccccactggggtctgagggcgcaacccaagccaccctgaaggggtgtgtgcacaaggagctctcaggagaagcccccaaggtggcctgttggaaggctctgatgggaacatttccttccaccttcaagaaagaagcaatgggaccctgaagaatgcagcccagagagatccaaagggtcagaagctctggggcaaatctggtaaacttcctgggggtgccacagactcatctccaccttgccctgtggtctggccccgccttctggtggagcctgcccccgccttctggtggagcctgccccgtccccaccctgacacttgacctgtggctgacagtgggccacctctgctccactcaggctccgtggccggagagtctgcagcttctctggcattcctcctccccgtctgggtcctgtgatggaaacagtctcattcagctgccccagagactcacaagtcctttactcattcagcaagtattttccagtccctgccatgtgttgggcccctgttaattctatagtaatatttgttgtggtaaataaaattgccttcatagtgatgtcatggtggagggaggaacactcaggagaagagggtgtctctgagcccacagagctcccactgctatttctaagaggccagcaatacatctttgcatttcagaaaactgggtctattcaagaaataaagatggatggaggtcaaaatgggaatggatttggagaacagagtgggggtggggatggagcaggatggaaatgagagggggtggagagggaataggggggaggttggtgatggggaggggacaggataaggaacaagatgaggaagggggaaggtggagttggagtggagatgaggatcaaagtgaggagggctgggtcatcctctggcctctcctaccatgccccatctacacggatgcaaagaaaacttcattcactcatcgaacgtttctgggactcttcctgaatgccagacttgcattggtacagaaaaatgactctcttcatacttgccttcaaagagctcagagtctgggctgcggagaggtctttttataaacaaaaacactggccgggcacagtggctcacacctataatttcagcactttgggaggccaaggcgggtggatcacatgaggtcaggagtttgagaccagcctggccaatatggagaaaccctgtctctactaaaaatacaaaattagccaggcgtggtggtgcatgcctgtaatcccagctacttgggaggctgaggcaggagaatcacttgaacccaggatgtggacgttgtgatgagccgagatcgtgccattgcactccagcctgggcaacaagagtgaaactctgtcaaaaaaaaaagagctatgacagacaagtggggcacagaatgaggagccatctatccctggtgggagtctgggaggacttcagagaggaagtgatggttatgtgtgtttaattggattcatttatttaattcaattagtaatacattcacatgttcgaaatcctaaaggcacaaaagaacttgtgtctggtcatggttgcataattctgtgaatgtaccaaacaccatggaaaccattgaattatgtactttaaatgggcgaatgatacagtatgtgacttatagctcaataaaattgtatttcagaaaagggtttatgtctccatcccacatctgataatagttcctccctgaagtcaaataatatggtgagtttcttctgtatcttttttgttgggagttggggagtgacatttgaagtggtgaatgagctgaatttagtcaagtagtggactgcggaatacagtgttctggcagtgacagaggcacgaaggctcgtggttctgtgaatgccccaatggttggagcatggggtgagggtggcagaatggcaaaggctgattgggggtggggtgagcagagccttggaggccatgcgaggcagtgtgtacttcatctgtaagcagtgatgatccagacctttaagctgcatgaaaaacaatgtgacaataatttaaagacacccaaatctccttccaacatcccgttgtcattcacctaagtgaaactgcagttcttgtctctatgcactcatgcgtttacctagttaggtaagcacagtctaaatacacttttgtattctactttttccatttaatattaatcataagcatctttacaggttgtcatgtaatactcaaatggatttttttttttgagatgaagtctcgctctgttgcccaggctggagtgcagtggcacgatctccgctcactgcaaactcagcctcctgggttcaagcgattctcctgcctcagcctcctgagtagctgggattacaggcacccgccatcgcgcctggctaatttctgtatttttagtagagacagggttttgtcatgttggccaggttgtctcaaactcctgacctcaggtaatccactcgcctaggcctctcaaagtgctaggattacaggcatgagccactgcacccagccaaatggatggtttttaaaggataagaggtactctatcaagtcgatagtaaacaaatcattccccattgggcaattgggttggttccaatttgctatcaagtggaagaatgacccagttggatcttggctttggacaatggcttttacatggccaactcacaggctcagagctaaaagggattcagggagtcagctgggctcatccttagggtttctgtggccgtgagtaagcaccccatctgaacccatttcttcatctggaaagtgataatgtatttaaatcactcaaaagctttttaggccttggtagatttctctgacactggaaggtccaaccacagcctacctgttacgcatcaaaggaactatctgaagacactggaatcctagccaggcagggtgactcgtgcctgtaatcccagcgctttgggaggctggggcaggaggatcgcttgaggccaggagttcaaggtcagcctgagcaacagagtgagattctgtctctacaaaaaattattaaaattagccgaccgtggtggcacatgcttatagttctagctacttgggaagcttgagataggaggatcaagtgacaagcccaggagtccgaggctgcagtgagctattattataccaccgtaccccagcctgaaggacagagtaccccagccttgtctaaaaaaaaaaagacataagactttgacgtccagatgctctctccatattctggcctagaaaagtgtccccatcaccctcttgccttccttggtcagatggcaaatgagtgtctggggcagatgcactctggaggctcaagaggaaacattcggggctgcctgcagcagtgctgaggctgcagtttaattttctttgacatcagtggtagaatttgtccactaggggccgggcgcagtggctcacaactgtaatcccagcactttgggaggccgacgtgggtggatcacctgaggtcagcagttcgagacctgcctggccaacatgatgaaaccctgtctctattaaaaatacaaaaaattagctgaccgtggtagcaggtgcctgtaatcccagctactcgggaggctgaggcaggagaatcgcttgaacccaggaggcagaggttgcagtgagctgagattgcaccattgtactccagcctgggcaacaagagcaaaattccgtctcaaaaaaaaataaaaatagaatttgtccactaggtactgtgctaggtgctggcgggggagacagtgggtcccagacagacagacatggccccccgactggcttggcccaggggagatgctgctggaacaagaaaacctctctgatggttcttggaagtgggagctggcccgaggccctccatctgcccctcatctccctctcagaggctgttgcttcttctctcagaccctctggccccagcttccctgtagctgccacagaaacctcatcatatgaagggaaagaggctgtagcattctcagtagggcccgggtctcaaacacctccatgctgcatgtctcttataccactttttttttttttgagacggagttttgctctgttgcccaggttggagtgcaagtgccatgatctcggctcattgcaacctctgcttcccgggcttaagcgattcttgagcctcagcctcccaaatggctgggactacaggcacgcaccaccatccccagcaaatttttgtatttttagtagaaatggggtttcgccatgttgcccaggctggtctcaaactcctgagctcaggcattccatctgccttggcctcccaaagtgctaggattacaagcatgagccacagtacccagccccttatgcctcttaactttacatctccgggtcagaatatgatggggaattctccctttctcgaggacctccaaggaatgtgatgtctgtcactcccaattctcctattgagaaggaaaagccagtacaggacagaatactctgggccagataatttccatctttgtttcacttaatccgcataacaaccttgaaaggcagatgttaattacacccatttcacagatgcagaaactacaattcagagagattaggaaacatgcccacagtcatctggctggtaaaaggtggggctgggagtgaacccagatctttgcagaattacacctcacggccttccctgggccgtggctctttttccactgcctggtaggcctgtttgaagaattaaacaaggtatcagactcatctgaatattgtaagaaaaaaaaaaagaatgaaacaaggtaatgcttgagaaacccttggcacctgatccatattaagtgaccctctcagagcaaagtcatcactcaaatgacaagggcagaaatatgcagagctgcttttcacaaaggtgctcaaccttgactgcacattgaaatcacctgggaagcttgtaaaactccacatactcggactgcgcctcagcctgatatgatcagagcctctgggggcaaaccacagacatgactggcttttaaatttccccgggtgattctactgtgtagccaaggttgggagaactctggagatggtagttcagttccaagcctcccaagaggaagctgactagagagtctaagacataaagaatgtgtccatcagaaggtgcagaaaggggccaggcacagtgtctcacctataattccagcactttgggaggctgaggcaggcagatcacttgagtccaggagttcgagaccagcctggcaacatggcaaaaccctctctctacaaaaataccaaaaaaaaaaaaaaaaattagccaggatggtgacatgcacctgtggtcccagctactagggaggctgaggtgggaggatcatttgagcctgggaggcagaggctgcagttagccaagatcatgccactgcactacagcctgggcgacagagtgagaagaccccgtctccctcagaaagagagcatcacagagcctgccctgacagtgacaatcagccacatttggagcagaggacctggccagggccaggacacgtcctgtcctagaggcactttagccatgcacatggagtcatcgggccttattgaagctatattgtgaccaactgctggttctgattcccagctcgacaggccagcttcccaccacatcatggtgatgggaagaaaatggacacatcacttacatctctttttgtaaatgaactaattgacattctaataagaattacttttgctttgacagttacagtaaatcaacagattgaccttcaggtgtaattttggtatatatagaccttccctgaaagacaattcccattggtgagctgaggaatctggtttctgattcaggcttctcccttggagtggggtgaattcaccaataaaccatcttgagatatcttgggagatgtcagccagcctcatctgatgcaaccagcctagccacggacttcacgtctaactttcagagcagagactccatgtcagcaaattcctcgcctccttccctcctctcctatagttttggctttttgtattgttttgtttttgttgttgttttgttttgtttttgtttttgtttttgagacagagtctcactctgtcacccaggctggaatgcagtggcgcgatcttggttcactgcaacctccgcctccaggttgaagtgattctcctgcctcagcttattgagtagctgggattacaggcgcccgccaccacgctcagctaatttttgtatttttaatggagatggggtttcaccatgttgttcaggctggtctcgaactcctgaccccaggtgatctacccaccttagcctcccaaagtgctgggattacaggcttgagccactgtgcccagcctgtttgttttctgagacaaggtgtttctgtgtcacccagactggagtgcagtggttcaatcttggctcactgcagcctaaacctcctgggctcaagtgatcctcccaactcagcctcctgagtagctgggactataaacgcatgccaccaccactggctttttttttttttttcaacagggtctcgctccatcactcaggctggagtgcagtggtgcgatcacagctcactgcagcctcagcctcccaggcccaagcaatcctcctgcctcagcctcctgagtcactgggattacaagtgtgcaccaccatacccagataatttttaaatattttgtagagacagagtctccttatgttgcccaggctggtcttgaaccttgagctcaatggatcttcctgccttggcctctgaaagcactgggtttataggtgtgagcaactatgcctggccccctcctatagtttttccctggccaatatccctcttataaatccacagagcttctcactctctgcagggaatattaggtcattcacatacctgggttcagtccctacaccgcagtcatcgtgatgcttacaccccagacaccccagacgtgtgtcctccttcaaacagcctattcccacccactaagcctctgcccatgtgttccgactcctccctcccttccttcctctgcttccttcctctttcctcttccttctccatctagtgacagcttattcactgtctaaaacccaactcgaatcccactctctcgacctttccctgaacaacattatttactttgttgtctctgctcccatagtactttggacagaactctgccatggaggttcacaaactgaactctagttccttgaccacgtgtgtcctcccctcactccccacactgaacctggctttggtggcctggtgcccagcatggtgttgtgcccgtgtgtggatgcttaaatacatctttgaaatttgaataaatagtaaacattgttatacatgagtcatgtttttctctttaaaagccacatcatatccatttgctcattggactacttcaaaagagaagctctaaggacatccaaagatcctaagtgaaaaatcaccctggctgcacgggtcaagccaggacacagggccaaaggtcggtcagcactgacacgctgagcccaggcgtttgctttccagatgagacctgcaccgctggaccagcaatgcagcagaggcagcaggaagagggagatggagccaaagggtttctggacaggcggttgctggcagatctataaatcgatgccccacaatgggctgtcactgaaacaggccaggagtagcccagagcctggaggtagacctgagagggcagggtgtgggaagattagaagcataggctaggccaggcacagcggatcgtgcctgtaatcccagcactttgggaggccgaggcaggtggatcacctgaggtcaggaggtcaagaccagcctggacaacatggtgaaacccatctctactaaaaatataaaaaaaaattagctgggcatggtggcacatgcctgtaatcccagctactcgggaggctgagccaggagaatcacttgaacctgagaggcggagtctgcagtgagccaagatcgcgccattgcactccagcctgggcaacaagaggaaaacgctgtctcaaaaaaaaaaaaaaaaaaagcataggctagaaattggaccacaaaataatatagaatttgacatgtgggtgaagatgggtgttttgggggctgcaaatcagtcatgttctcctcaatctgcgtaagcagaggcaatgcggtatagtggtttacagtgtggcttctggaactaggttcctggggtttggatccagcacatgtgacacatgtgaccttgaacaagttatttaacttctctggacttcactttcctcacttgtaaaaggggaacagtaataaaatctacctcaggatttttatgaaaattaaattagtaaatccatgtaatttttctttttttttttttttgaaatggagtctcgttctgtcacccaggcttgagtgcagtggcatgatctcggctcactgcaagctctgcttcccaggttcatgccattcttctgcctcagcctccggagtagctgggactacaggcgcccaccaccacacctggctaattttttgtatttttagtagagacggggtttcaccatgttagccaggatggtctcaatctcctgacctcatgatccgcccgccttggcctcccaaagtgctgggattacaggcgtgagccaccgtgtctggcccatgtaatttttcagaacaagtccctagcttatagtaaatgctcaatgaatgtgagctattatttaatattttattaagtagcatctatgaggtattgaagtgactgtgtaaggaaaccacggtagctcacatctataatccccatactttgggaggccgatgcaggaggattccttgagcccaggagttcaagaccagcatggacactccagtaagaccctgtttctaccaaagaaattttgttaagttagccgggtgtggtagcaagcacttgtagtcctggctacttgggaggctgaggcaggatgatctcttgagctcaggaattcagggctgcagtgagctatgatggattgcaccattgcactctggcctaggcagcagagcaaaacactgtctctaaaaaaaaaaaatagaaggaaagaaaaaggaaaccacccgaaaacatagtggcttaaaacaacaaaccaataccttgctcacagttctgtaggtcagcaacctggctcaggctctgttgggcagttctgccagattctcctgggattgctccatggatcactcacatggactggggctgggtggtctaaggcggcctcactctcagcgctggtgactgggggtggctgtcagacaggccccatgttgtagtaacctgtctccaggaggctgcccggacttctcccccttgtgagctggggttccaattgtagcccaaagagggtaagccctggcttttcaagcttttgcttagatcacatttgttttttgttgtttgtttgtttttctgagacagtctcactctgtcacccaggctggagtgcagtggcgcgatctcagcccacggcaatctccgcctcccaggttcaagcaattctcctccctcagcctcttgagtagctgggactgcaggtccccgccaccagagccggctaattttcgtatttttagtagagacagggtttcaccatgttggccaggctggtcttgaactcctgacctcaagtgatctgcccgcctcggcctccccaaagtgctgggattatgggtgtgggccaccacacctggcctacttatatcacatttgttaatgtcccattagccaaggcaagtcacaagatcaagcccagattcaaaggatgaagacatttacatcttgatgggaagagaggcaaagtcacaatgcaaaagagcacacgtcagggatgggagcattttcacagccgtgcgaacagtgtactatactgggcaccagacatgtaagcagagctcagttctggaggctggaaggaatgctttcttggccctcggggctcaggatagcaggttaagatgcaagcaaaaccattatgatgcaaggtctgaatgcgataagtgccccaacgtaggagttcaaaccagacagatcttttgcagctaatgaggggtggaggtcaatgggttgagaaggctttattttcttgaccttgaagtgtggttagaatctggtcatacagacatggggaaaatgatattccaggtggaggaaaaagcaaagttggaaaaaccaaggcatgtttgggaaatccaaacttatctaatatatctggtgtgtggccatcaaggggaactgcacagcataaaactagaaagataagctggggtccaatgcaggtgagcttgtgtttgaacttcagtttgaacttcattctgtaggcaatggggagccactgaatatttttcaggtgacaagtgaaaagaactgtattgtaagaagactccttggcctgtattctataggatggcttggggtggggagcaagaagaggagaggtgatcacaggtaatgaagggactgtgggcgggcggcggggagggggcgggcctaggcaatggggttggcccggggcagcacgagtagaaagtatctggacagatcctgatgagtgactgcaaatgtgacatgaagaggtgtcaaggttggctccgaagttgccaggctcactgcccagaggatggcagagagcaggagattcatttacaaagcaggggagtctgagcaacaacaggtgtgaagggaccctatggatgtggggactgtatgggacatccaggtggtgtccaaccaaggtctaacgtcatgctaaggaaggaggaggaagagaaaggagaggagactttgtcaaagcaacactgaacacagtgtttcaaggtgcttaacagtcaagtattagatgtggccaaatgattaaggaagaagaaagatgagtagaggccaaccagctgatttgacaatgaggaggtcacaggtgacttcctaggagagcagaggaggctgaagtccccaggctttcttttctttttttctttttttttttttgagacggagtctcgctctgtcgcccaggctggagtgcagtggtgcgattttggctcactgcaagctctgcctcctgggttcacgccaatctcctgcctcagcctccctagtagctgggactacaggcgcccgccaccatgcccagctaattttttgtgtttttagtagagacggggtttcaccgtgttagccaggatggtcttgatctcctgacctcatgatccacccgcctcggcctcccaaagtgcccagggtttctttttttattttattttattttatttttttgagacagagtctcactctgtccccaggctggagtgcagtggtgtgatctcggcttactgcaacctccgctttctgggttcaaggtattctcttgcctcagcctcttgagtagctgggactacagggcatgccaccatacccagctaatttttgcatttttagtagagacggggtttcaccatgttggccaggatggcctccgtctcctgacctcgtgatccgcccacctcggcctcccaaactgctaggattagaggcgcgagccactgcacctggcccccaggctttatttttatttgttagtttgtctcactctgtcacccaggctagagtgcagtggtgggatctcagctcattgcaacctctgcctcctggctcaagtggttctcccacctcagcctctcaagtagctgggactacaggcacatacaaccacacccagctaattttttttagggggttttttgtgggtttaatttttgtgggtttcttttttcttttttttttttctttttgtagaggtggggttttgccatgtaactgaggctggtccaagctttattttttatattttatttattttaatttaaattttgtatggaatgcttcacgaatttcacgacttgtgcagggcccacactaatcttccctgtaccactgcaattttagtatatgtgctgccaaagcgatgactgaagtccccaggctttgaggagggagcaacaggcatcctgctttctgggattcgaagttggagagaacccctagacttacatgaccctctctttccacttcacacccactagagtgaatgaaatgttaaaaataaacactgctgttcccttccaccctaaagaagagaggcacgctagactctccctgctcctctccctgtctctctggcctgctggctggagatcaggcaccaccaggcagacaggcgctggcgggacaggcggctgtttactgctagtagagtactgctgtgttttcacagctcagaatagctctatagccacccccaggcctggggacctaggagcctcactgtttattttcatgacaattctgggcctcacctcttcccttctctgagtcaaggtcctcatttgagaactctcagagggggtaaggtgtgggttaaagggtccaagactactaatttcctaattatctgtcccagctggctctggaagaggggaggacgaataactgactgtacaacacgggcgttttggttgggatggaatttcccctgcttttaaagaaagagttgattaaaggactgcatggccagagccggtggggaggaaaacgtgggaatgaaagagggtagaagggatgaccccatctggattgcgacaggttctgtgtgaggagctttcactagagaattatgggggcttctctgactcatggtgcccctcaaatcaggctgggttctggctgccctggtgtttaaaaggtattcagaggtaggggaagactggcttcacagaatactcttttgaactctgaatttttttaataatgtgagtgtattacttttgaaaatattttaggctcactcctgtaatcccagaactttgggaggccgaggcgggtagatcgcctgagtttgggagttcgagactagcctggccaatgtggtgaaaccccatctctactgaaaaaaaaacaaaaattagtcaggccctggtggcctgtgcctgtagtcctggctactcaagtggctgaggcacaagaatcacttgaacccgggaggaggaggttccaatgagccaagattgtgcccctgtactccagcctgggtaacagagtgagaccctgtctcaaaaaaaaaaaaaaaaaaaaaggccaagcatagtgactcacacctgtaatcccagcactttgggaggccgagatggatggatcatctgagctcaggagttcaaaaacaacctgggcaacatggtgaaaccccatctctactaaaaatgcaaaaagttagccgggcgtggtggcgcgtgcctgtaatcctaactactcgggaggctgaagcaggagagttgcttgaacccaggagccggaagttgcagtaagcagagatcgcaccactgcactcaagcctgggcgacagagggagaccctgtctcaaaataataataataataataatttttaaaatatgaacacatttatctttttgttctggcaatcattaatcatttacttctgttagataattcaaagccaggcaccacttcattggaactacgttcaaaggactgccactactcagaatatcaaagctgaaaagagggtgagggtccctgggtctcattttacagttgacaaaagcaaaccccagagactccagtgatttggccaaggttgcacagttgttaaattttatttcttttttaaaatccggtgatgcccatggcgggggtacagtttcctgggctgcctgctggaggcttgagagtgtttctgagagtctgctaaggaaaaggaaggagcactttctgccccctgcccacctcctacccaccagcccccacctctctcccgtccacaaccaggctgagcaacagctgggcaattgatgacttggtttctttccctccttctttagtcggtctcaattattccaaagaatccttgagttgaagcaaggagggacagcggtttgggcttagctcaagtcacacttcccttctctcctcaaatagcccttctttgcctctgggatacagaccaggaccaaggggaaagaaagccttttaaaaatagtcctggccacacttttgcaggtttccttcccttgcctctgcctctctagtgcaccatcagcaagtttaactcctggcaggaaggatgaaatttgacagcaagaatgtttcttaacttccttcccttgcctctgcctctgtagtgcgccatcaacaaagtttaactcctggcaggacggatgaaatttgacagcaaaaatgttttctaactgcaaaggtggtttggcactgcaaagggttgattaagaatgggagaagaggttgggcgcggtggctcaagcctgtaatcccagcactttgggaggctgaggcaggcagatcacttgaggtcaggagtttgagaccagcctggccagcatggtgaaaccccgtctctactaaaaatacaaaaaattagcagggcgtggtggcacgcgcctgtaatttcagttactcgggaggctgaggcaggagaatagcttgagcctgggaagcagaggttgcattgagctgagatcacgccaccgcactccagcctgggcaacagagcaagactctgtctcaaaaacaaaaacaaaaaacaaaaaacaaaacaaaaccagaaaagtctaccatctgtttgtgagggaactagttaaatgttcgtggaaacaggttacttcctggagggaacaacagcttcttttgggaagggggctaaggaagagcgaggtgaagaagaggaagggcagttcgtgcttcccataaaggttctggtgactcatttgattttggaagaaggcaggccctgggatggcaggaggaaggtatctagtggggagttctgagatgtttacaatgcggcaaatgacttcaggttttcttctgtgcacaaaatgtgcagcccatcctgagacacgctccacgcttcccctacctgctcagttcaaggtcctaaagctgaactttctcactgtgccagagagaagccagccctttgcactggcgaacaatgattaacccgcctctccctccacctgtttttctcaacatgtttttctaaaacataaactgggtcactcacttagaaggtgacagcagttgatctggccagtttcccatgtccaccatgaaacacttcctccattgatcacttggtagggaaaaaaaaaagcatacaaaagaaaagtaattaaaaacaaaaataaaactgtacattttgcactttgggctgtagccctgctgctcggacgaagctgtgaactggagctaggtttcgaatcccatctatagtatgtagaaaacacccattctaggtcaggcacagtggctcacacctataatcccaacactttgggaggctgacagaggaggacacttgagcccaggagttacagaccagcctgggcaacaaagtgagaccctgtttctacaaaaaatacaaaaaattcgccgggtgtggtagcaccggcctgtagtcccaggtactggagaggctgagctgggaggattgcttgggacccaggaggtcgaggctgcagtgagcattgatgggaacagtgcactccagcctgggcaacagagtgagacccatctcaaaaacaaaacaaaacaaaacaaaacaaaacaaacctattgtaggatgataactgagtaaaggaaaggtggctcctctctcaacagaatccagagcccccacccagaatagaagatacagcttcaggtaaaatcagactttctttttggtagtaaatgcaatttttggatgaggtgtgtggtaagttacagctccttttccctctttgctttctcgtctgcaaataaacttgttcgagtgaatgagtcaaccttgccctgggagaatgtgccagggccctgggcccagctgcacttactcatcagcagaccagactgtacttcctggcatctttccttcatgttcttctcaagatccaaagcctctggatttctagttgtggggaaaatgcctgaggagtggcttgcttgggtacctaccaaagaggagcccaaatgattttccatcctcattccttccccaactcagctggccatttccctagagggtgttaacgaatcttctctaccgaggacaaaataatagggaactcactgatatttctacaaaggaaatcaaaatatttcatcccaaactatggctcccaatataataagtactttttttgttcgtttgagacagggtctcgctctgttgcccagcaggagtgcagtggcacgatcacgactcactgtacctcccgggttcaagtgatcctcccacttcagcctcccgagtagctgcaattacaggtgccagccacctcactgggctatttttttttttttttttgaaatagggtctctttctgtcacccaggctggagtgtaatggtgtgatctcggctcgctgcaacttccacctcctgggttcgagggattctcttgcctcagcctcctgagtagctgggattacaggcgcccaccactacacctggctaatttttgtatttttagtagagatggggtttcaccatgttggtcaggctggtcttgaactcttgaccttgggtgatccacccacctcagcctcccaaaatgcttggattacaggcgtgagccactgcacctggccaatttttgtattttttgtagagatggggtttcaccatgttggctaggctggtctcaaactcctaagctcaagtgatccaccaacctcagcctctcaaagtgctgggtttacaggtgtgagccatcgcaccaggccgtgactattttaaataaaaaacccttgagaggttttttcacccttgggagcctggaagagattttttcccctatctttcacctataaagataggactggccgggcatggtggctcatgcttgtaatctcagcactttgggaggccgaggcgggtggatcacctgaggtcaggagttcgagaccagcctggcccaacatggcaaaaccccatctctactaaaaatacaaaaattaatcgggcctggtggcacatgcctgtaatcccagctacttggggggctgaggcacaggaatcggtggatctcaggaggcagaggttgcagtgagccaagatcatcgcattgcactccagcctgggcaacaagagtgatactccgtctcaaaaaaaaaaaaaaaaaaggactgacacaaaagaacaattgttcttctccttcctttatcccattatccatcacagaaaagaagaccaaaaatgtaaccataaaaaagtctcaacagaccctttttcaagacaatgactgtctctgaggaccatttaaaatccagggagaactatttacaagttaatttctgttcctcgatccaatcattctccctctgcccttcgacagaattcctcttctcctccttcccataacctgtttttaacaggatccaagccacccattctttctgcaacctcaagatggtggatgagcttccatacctcactgggaagttggatcttcattcttaagcctcccatgtatacatgttaaatacatttgtaatctttttctcatattaattaatctgccttatgtcagtgacttttcagcgaacttgtaggtagtcactcacataaggatcctccagtttacatagttttgtaaatgtcaggtcaccctgtcccactagaccaccaaggtcctggaggacacctgggatttaacttttttttttttttttttttttgagacagtctcgctctgtcactgaggctggagtgcagtgtcaggatctccactcactgcaacctccacctcccgggtttaagtgattctcctgcttcagcctcccgagtagctgagactacaggtgcccctcatcatacccggctaatttttatatttttagtagagatggggttttgctatattggccaggctggtcttaaactcctgacctcaggtgatccaccctcctcagcctcccaaagtgctgggattacaggcgtgagccaccatgcccagcctggcttttaacttttaattcctcagagagccaggcatggtgctttgctcaggaaatgttggttgaattaaaccggagcacttcttgaaaagggaaaataacaaagagttagaaggagatggcgggaacccctctctggagatagttctttaaattagtggattctgcagggcactgttgctcatacctgtaatcccagcattttgggaggccaaggcaggaggaccacctgatgccgggagtttgagaccagtctgggcaatgtagagagacccccatctccacaaaaaataaaaagttagctgggtttggtggtgtgcgcctgtaggcccagctacccagagactgatgcaaaacgatcccttaagcccaggagactgaggctgcagtgagctgtgatggtgccaccgcactccagcctgggtaacagagtgagaccccgtctcaaataaacagataaatgagtggattctcagcaaaacttctagccactcgcctcatatatccacaagacctttgagaatccacggtgtctcgatgcagtcagctttctaacaagctggggcctcacctgttttcccacggataaaaacgtgctggaggaagcagaaaggggctggcaggtggaaagatgaggaccagctcatcgtctcatgactatgaggttgctctgatccagagggtccccctgcctggtggcccaccgccaggaagactcccactgtccctggatgcccagagtgggatgtcaactccatcacttatcaactccttatccataggggtattcttcctgaggcgtctcagaaaacagggccctccccatatgctgaccacataatagaacccctcccaactcagagaccctggctgctagctgccctggcatgacccagacagtggcctttgtatatgtttttagactcaccttgactcacctctgaccatagaaactctcatcccagaggtcactgcaatagttactccacaacagaggcttatctgggtagagggaggctccctacctatggcccagcagccctgacagtgcagatcacatataccccacgccccagcactgcctgccacgcatgggcttactttacacccacccacagtcaccaacacattacctgctctccaaggttaggcgtggcaggagaagtttgcttggaccagcagaaaccatgcagtcaaggacaactggagtcagcatgggctgggtgcgagcccttggtggggtggggaggagactccaggtcatacctcctggaggatgttttaatcatttccagcatggaatgctgtcaacttttgccacagattcattagctctgagtttcttttttctgtccccagctaccccttacatgtcaatatggacttaatgatgggaaattcaggcaagtttttaaacattttattccccctggctcttatcctcaaaaaatgcatgaatttggaggcagtggctcatgcctgtaatcccaatgctttgctaggttgaggcgggaggatcacttgaagccaggaatttgagaccagcctgggccgcatagtgagaccccgtttctacaaaaataaataaataaataataaataatagtgatatgaagcatgattaaatagccctattttttaaaatgcatgagttcgttacctgattcattccctggttcctttcacagtcctccgtgacccaagtgttagggttttggtctctctactatttgtaggctgatatatagtatacacacacacacacacacacatatacacacacacagtgtatcttgagctttcttttgtatatctacacacatatgtataagaaagctcaagatatagaagccctttttcaaaaataactgaaagtttcaaactctttaagtctccagttaccattttgctggtattcttatttggaaccatacattcatcatattgttgcacagtaagactatacattcattattttgcttaaacgtatgagttaaaacacttggccaggcatggtggttcacacctgtaatcccagagctttgggaagccaagactggcagatctcttgagctcaggaattcaagaccagcctgggcaacatggaaaaaccccatctctacaaaagatagaaaaattagccaggcatggtggcgtgtgcctgtggtcccagctactcaggaggctgaggtgggaggatcacattagcccaggaggttgaggctgcagtgagccgtgattatgccactgcactccagcctgggagacagagtgagaccctgtttcaaaaaaaagagagagaaaatttaaaaaagaaaacaacaccaagggctgtaactttaaggtcattaaatgaattaatcactgcattcaaaaacgattactttctggccctaagagacatgaggccaataccaggaagggggttgatctcccaaaccagaggcagaccctagactctaatacagttaaggaaagaccagcaagatgatagtccccaatacaatagaagttactatattttatttgttgtttttcttttgttttgttttgttttgttttgttttgttttagagactggggtcttgctcgattgcccaggctgtagtgcagcggtgggacaatagctcactgcagactccaactcctgggctcaagcaatcctcctgcctcagcctcctgaatagctgggactacaagggtacaccatcacacacaccaaaacaattttttaaatttttgtgtagaaacgagggtcttgctttgttgcccaggctggtctccaactcctggcttcaagggatcctcccacctcagcctcccaaattgctgggattacaggtgtgagccaccacaaccagccagaactttactaattttaaaattaagaacttaaaacttgaatagctagagcaccaagatttttctttgtccccaaataagtgcagttgcaggcatagaaaatctgacatctttgcaagaatcatcgtggatgtagactctgtcctgtgtctctggcctggtttcggggaccaggagggcagacccttgcactgccaagaagcatgccaaagttaatcattggccctgctgagtacatggccgatcaggctgtttttgtgtgcctgtttttctattttacgtaaatcaccctgaacatgtttgcatcaacctactggtgatgcacctttgatcaatacattttagacaaacgtggtttttgagtccaaagatcagggctgggttgacctgaatactggatacagggcatataaaacaggggcaaggcacagactcatagcagagcaatcaccaccaagcctggaataactgcaagggctctgctgacatcttcctgaggtgccaaggaaatgaggatggaggaaggaatgaatgttctccatgactttgggatccagtcaacacattacctccaggtgaattaccaagactcccaggactggttcatcttggtgtccgtgatcgcagacctcaggaatgccttctacgtcctcttccccatctggttccatcttcaggaagctgtgggcattaaactcctttgggtagctgtgattggagactggctcaacctcgtctttaagtggtaagaaccatatagagaggagatcagcaagaaaagaggctggcattcgctctcgcaatgtctgtccatcagaagttgctttccccaggctattcaggaagccacgggctactcatgcttccaacccctctctctgactttggatcatctacataaagggggaagacagaaaaaatcctaccagtgagttgaaaatacaggaaagcctatttcatatgggttaaagggtaggacagttgaatttcgtgaaaagtctgagttatataggctttgagcaaagagttttattagtatgaagcagaagaggtaacataaagaaagatgtatggggccaggcatggtggctcacacctgtaatcccagcactttgggaggccgaggtgggcgaatcactcctgggtgaactcaggagttcaagaccagcctgggcaacatggcgaaactccatctctacaaaaacattacgaaaattagctgggcgtgttggtgctgtagtcccagctactcaggaggctgaggtgagaggcggaggaggttgcagtgagtcaagatcatgccactgcactccagcctgggcaacagagtaagaccctgtctcaaaaaaaaaaaaaagatagatgatgtatgctgtatgaaaaaaggaaacacacagatgattcaacagcctgttttgtggggtaatgaaaagtcaccctgggaactgggctccagccctcgttctgccacccaccaactacatgtccttggcaagtcatatcaattatctgagtttctgttttataatctacaaataggttatctctggcagcttaataataatcagggttaacatttattaaacagtgtgtgccagtccatgtgctatgtgcttttctgtgaggtagttactgctatttacagaaacagtagatgcagagaccaaggtgctgagttaaatgattaggccaacaaggttagtacatgccgagccaggatggaagcccaggtaggcaggctggcttccgcggcaatgctcttatgaactatgttacgtccagtgctgataaactgactctctggggagcaggggaaagccctgagtttagcatttgccaatttctatcacgtaaacattcccattctggccactttctttctttctttcttttgtttgtttgtttgagatggagtctcgcactgttgcctggctggagtgcaatggtgcaatctcagctcactgcaacctctgcctctccggttcaagtgattctcctgcctcagcctcccaagtagctgggattacaggtgcccgccaccatgcccagctaattttttttgtatttttagtagagacatggtttcactatgttgactaggctggtctcgaactcctgacctcatgatctgcctgccttggcctccctaagtgctaggattacaggcgtgagccactacacccagccgcatgattctaaaaaataaaaagatgaagtgttattccaaacatctgatctccattgaagaaccatgcaatctctctgggttgatagaggccagagttagtggctctccctgatttcggtgagaaatcactattccaccatcacgggataaaaggcatcctgactggcggttgacacctatttccacagtgaaagatatatctagtacttttaaaggggaagtggtttgtctgagatactctgtttcaaagtagagaggatacagaacaagcatctgaagctatatacatccttacagagagcaattctgatggaaatgcaggccatgtttccctggggggggctcgtcctaggggctggagtgcattctctgatgtcagaggaaatgcaagattccctgaggcctgagggaacccatggtatatgcaagtccaagtttcaaactgtagttccatatgcattcttccaggacaaatacttcttgaggttaaaaaaaaaaagtcacatagctgccattttatggatttcaggatttttttttttttttttttgagatggagtcttgctctgtcacccagcctgtagtgcagtggcataatctcggctcacggcaacctccgcctcccaggttcaagcgattctcttgccttagcctcccgagtagctgggattacagtcacgcaccaccacatctggctaattctttatattttttggtagaaacggtgtttcaccatgttggccaggctggtctcaaactcctgacctcatgtgatctgcctgccttggcctcccaaagtgctgagattacaggtgtgagccaccgcgcctgcctggagttcagaatcttgggcttcattatttgtgtttaaatagatcatacagtcaggcacggtggctcatgcctgtaatcccagcactttgggaggctgaggtgggaggattgcctgagttcaggagatggagaccagcctgggcaacatggtgaaaccccgtctctactaaaaatacaaaaactagctggatgtggtggcacacacctgtagtcccagctattcaggaggctgaggtgggaggatcccaggaggtagaggtcacaatgagccgagattgcgccactgcactccaggctgggttactgagccagatcctgtctcaaaaaaaaaaaagataatacattcaaacagttcaaaatgcaaaagttacatacataaggaagtgtcatgaaatatctccctctcacacttctccccagccacccagttctcccttctagaggcaacatgtgaaatccttctcaggctacactcttcttgaaggtgtaggctttgggcaaaagcattcattcagtaaccccagaaacttgttctgtttttccataggattctctttggacagcgtccatactggtgggttttggatactgactactacagcaacacttccgtgcccctgataaagcagttccctgtaacctgtgagactggaccaggtaagcgtcccagcccctgcagacagaagctgagtggacctcgtttacctgttatggatgaaactgaccttgaggggacatgaggagagccattcctttgtacttttgtcatgctcttcaattggcacaaattaattcacttctgcaatactttcctgaatagcacagtagtattggaaatctgcctattacagaacctggatggagtccagagaggcacgggcatccatgggcaaagggctcgtgagagtcaccgccctgcagcgctgtgtcctgagaaaggagggggcagaagcctgagcttctgggggtccttcccaatggcctggcccactggatgtgccctcctgagctgaccgtccaatcccttgccctctctgtgcctacgttttattagttacagccagatggttactgtcaaatcaaatgatagatttcattttcagtatgtaataggaagcccctccctcaccctaaagtctcagctgccctctaagactagtactctctaaggtactagtatcccttcctcagagaccctttccctgaccccaaaactagggaaggtcccttagttatttgctctcacagaccacgcatttacctcagagcatattcactcattcagctgttacttaccaagcacctactgggagctatacactgttctatgtgctagggatacctctgtcagtgaacaacacagacacaaagatccctgcccttgtggagctgaaatctgaatagaggaggtgaaatatacaaaaattataataaataagtaaactaggccagttgtggttgctcatgcctgtaatcccagcactttgggaagccaaggtaggtagatcacctgaggtcaggagttcaaaaccagcctggccaacattgcaaaatcctgtctttactaaaaatggaaaaattggtcaggcgtgatggcacacgcctgtagtctcagctacctgggaggctgaggcaggagaatcgcttgaacctgggaggcagaggttgcagtgaaccgagatcggaccactgcactccagcctgaatgacagaacgagactctgtctcaaaaaaaaagtaaactattaatatgtaggataggccaggcacggtggctcaccctgtaatcccagcactttgggaggctgaggcgggtggatcacctgaggtgaggagttcaagaccagcctggccaacatggcaaaaccctgtctctactaaaaatacaaaaattagctgggtgtcctggtgcatgcctgtaatctgagctactcaggaggctaaggcaggagaatcgcttgaacctgggaggtggtgagccaagattgcgccattgcactccagcctgggcgacaaaatgagacaccatctgaaaaaaaaaaaaaaatatatatatatatacacacacacacacacacacacacacacacacatataatactagaaaatgattgtttataggcaaaaaaaaaaaaaaagaagaagaagaagaaaaggaaaggagaaggaaagaaggaccaaacatcttttgtagaaatatgtttgctttcatcataacagcttgttatcaaggatgaatttctccctgaaattaatggaggcacagactggaaagtttaaagtggctttaagaggttattttatttagtcctctgtcttaatagaagcaaattattatctctgctccttaggtagagtagctaaggctcagaaagtaggccgggcgcggtggctcacgcctgtaatcctagcactttgggaggccaacgcaggtggatcacctgaggtcaggagtttgagaccagcctggccaacatggtgaaacctcgtcactaataaaaaaatacaaaaacttagccaggcatggtggcgggcgcctgtaatcccagctacccaggaggctgcggcaggagaatcacttcaacccgggaggcagaggttgcagtgagctgaaatcacaccactgcactccagccttggtgacagagaaagattctgtcaggaaaaaaaaaaaaaagtttaaatgaattacccaaggtatataattgttagtgttagaaggaagaagaagggagggaggaaggaagggagaaagaaagggaaggaggaagggagggagggaagaaagcctttatttatctatggggttccctggaaagcaggctgaaatggagattcacgtgcaggagtttagatactctggggaactatacttgtagaagggaaggaacaggaacagggcagaaggagaggtccggttgtgattctgcctcatccaaccccacagcgagctctgaagctggggatggctcctcagagttggtccaagttgggacaagggaatcagaccctggggagagcgtaaccttgatcaaggcgactctctttagcccagggcaatgccaggagaaggctgagagcagaaagccatctaccatcacactctcaacagctacgaaataagtcctgcagttcaggagggaggtctgggcggcacatctcaggaccctctatctctcagggtagaggaattaagaatgggatgggaaccagacgggccatggtggctcacacctataatcccaacactttgggaggccaagggtaggaggattgcttgagcccaagagttcaaaaccagcctgggcaaaaacaatcaaacaaacaaacaaaacacatttaaaaaatttgctgtgtgtggtggtgtgcacctgtggtcccagctactcagggggctgaggtgggaggattgcttgagtccaggaggtcgaggctgcagtgagctatgatcatggcactgcattgcagcctaggagacaaagcaagacactgtctctaaaaaaacaaaaaacaaacaaataaaaaaacggaaccggttgcaagcagggttaaatagcgtggtcagagtaggactcactgagaatatgagatctgagtcaagtcttcaaggatgtgaggaagtaagtttctggcagaagagctgtgaagggctgtctggccagagaagattgcaatgcaaaagccctgaggtgggaacgtgtttggtgtgtttaaaggaaagcaatgaggccagtgtagccagaacagagtgtgcaaggagagaaggaacagaagatgtggagggcagatcagtttgtaattgtacgcccagtatgctgattctttgtgtaatctccagactgtattaaactgcaagagcagggcccctctctggctttgctcatcattgtattcccagagccttgcacaatgcttggtgcataggagatggaaatttgttaaataaatgaattatggataacgaatggatggtaagatgggtggatggatggggggtgaacggatggatggggggtgaatggatggatgaatgggtagatgggtggatagggggatggctgggtggctgggtagatgatgcactgtctcccagatgaggaccttttcacctttactccattctctttcctgccctttagggagcccctctggccatgccatgggcacagcaggtgtatactacgtgatggtcacatctactctttccatctttcagggaaagataaagccgacctacagatttcggtaagaactcaccactggggtgtaggtggtggagggcaggaggcagctctctctgtagctgacacaccacgtattcttcctcacatccccctagcccgctcccacacctgggcagccgctgattaagagttgtggcactttggatagggataaacctcagagtcagggaatgtttgggctgaaagggatccagtagtgcaatccgttgttttacagataaggaaacaaagcccaacaccatgaagggacttataaaaataaggtagtgaagtagcagcagggcttaaataaaaacccatgtctgtaccaaccacagagtcacccatccaggttaaaataaccagagaaacagaagatattcctactacagagaattccgggtgtgcagccacagtgcaaatcctttttatttttatttttgagatgcagtctcgctctgtcatccaggctgaagtgcagtggcacgatcatgtctcgctgcaacctctgcctcccaggctcaagcgatcctcccacctcagccatctgagtagctgggaccacaggccacacaccacacccagctaatttctcgtatctttttgtagagacagagttctgctatgttgcccaggctcaggctggtcttgatctcaagcaattggcttgcctcagcctcctaaaatattgggattacaggcatgagccaccgcgccagccatgcaaatccttaattatcaaacagataaaatagggaagttaaaattcatatacacaagggttaaccacttgccacaggcattttttttttttttttgagacggaatctcgctctgttgcccaggctggagtgcagtggcgccatctcgcctcactgcaacctccgcttcctgggttcaagctattcttctgcctcagcctaccgagtagctgggactacaggcacgtgccaccacacctggctaatttttttatttttagtagagatggggtttcaccatattggccaggctggtcttgaactcctgacctagtgatccatccgcctcagcctcccaaagtgctgggattgcaggcatgagccaccgcgcctggccttttttttttttttttgagacggagttttgctcttgttgcccaggctagagtgcagtggcgcagtctcggctcactgtaacctccacctcctgagttcaagcaattctcctgcctcagcctctcaaatagctgggattacaggcgtgagccaccccacctggctaattttgtaattttttttttagtagagatggggtttcacctgttgatcaggctggtctcaaactcctgacctcaagtgatccacccacctcggcctcccaaagtgctgggattacaagcataagccaccgtgcctggtcaattttgatcttttttaaagagacaggggtcttgctatgttgcccagactagtcttgaactcctggcctcaagtgatcctctcacctcggcctcccaaagtattgggattacaggtctgagccgctgcacccagcccccaacaggcatctttggacttttgagtactggctttaatttacaaaaattccactgagagcacctaagtttgccaggctccaacatttctgcaggggctgttttctttgctgaaggatctgcacctgtgttctgttatggttgcctcttctgttgcaggtgcttgaatgtcattttgtggttgggattctgggctgtgcagctgaatgtctgtctgtcacgaatctaccttgctgctcattttcctcatcaagttgttgctggagtcctgtcaggtatgggctgatctgactcccttccttctcccccaaaccccattccgtttctctccctaatcaggacaaaatcccagcattccagccacatcctgtgtgtaatcagtactgttagcatttctgtgggttgaaagtcaagaatgagcaacttgaaatgattaatttctataagagtgcccagatctatagaatgaattgtgtagaagttaccatacatcaaattaacgcaccaaattgaattagcttgaaatctcagagctttttacaatctttatttcttactggtcttcaacaggccctaatttacttttcagggaatctgccaaatttaacaaattaacacgatgtcctaggaaagctgttcatttaaatacattcatttgcaaacctaatagataactgcagttgatctcttttataggttcagagttttgaatatgtttttttttgttttttttttttgagatggagtctcgctctgtgacccaggctagagtgcagtggtgcgatctcggctcactgcaagctccacctcctgggttcacgccattctcctgcctcagcctctccgagtagctgggactacaggcgcccgccaccatgcccggctaattttttgtatttttagcagagacggggtttcaccgtggtcttgatctcctgacctcgtgatccgcccgcctcggcctcccaaagcgctgggattacaagggtgagccaccgcaccctgcctgaatatgtgttttcttagatccaattaacaagggtaagacaagatttaagttaagcataagaaagattttgtgggaggcactggaatataagaccttaacaaaactgtggaatttctcccctggagatttgtaagaacggaacatagcagcattcaaagaagaatgttgagaacaagggagataatggtttcatggtaatcacaaaagtaacacagcatttagtactgggttccatgtttgaggaagaacctggaagccatatcacatgaaaaacctgggaatgtttaggttagagagaataactgtgttcaaatgtgtgacagagggactagattcatcacttactaactcctgcagaaagaactgagaaaaatagacagtattagagggggaccagtttcacacagacaaggaagaactattcagcaatcaattccgttcaaagataaaatggactgttatagtgggggtgagctccctacctctgagggtatttcaagtagagataggaggacctcctggtaggaaatttgcatacggtgggagattgtacgtgatatggcacctccatctgaaagagtctatattgagggcaggctggagtcacacatgggaataagccaggcgaccctcccatctgccatctgtgatttaattccacagtcgcagaacggatggcatgtcacccactcctccaaacccacctctagcaaaggtcccaaatccttcctatctctcacagtcatgctttcttccactcaggcattgctgttgcagaaactttcagccacatccacagcatctataatgccagcctcaagaaatattttctcattaccttcttcctgttcagcttcgccatcggattttatctgctgctcaagggactgggtgtagacctcctgtggactctggagaaagcccagaggtggtgcgagcagccagaatgggtccacattgacaccacaccctttgccagcctcctcaagaacctgggcacgctctttggcctggggctggctctcaactccagcatgtacagggagagctgcaaggggaaactcagcaagtggctcccattccgcctcagctctattgtagcctccctcgtcctcctgcacgtctttgactccttgaaacccccatcccaagtcgagctggtcttctacgtcttgtccttctgcaagagtgcggtagtgcccctggcatccgtcagtgtcatcccctactgcctcgcccaggtcctgggccagccgcacaagaagtcgttgtaagagatgtggagtcttcggtgtttaaagtcaacaaccatgccagggattgaggaggactactatttgaagcaatgggcactggtatttggagcaagtgacatgccatccattctgccgtcgtggaattaaatcacggatggcagattggagggtcgcctggcttattcccatgtgtgactccagcctgccctcagcacagactctttcagatggaggtgccatatcacgtacaccatatgcaagtttcccgccaggaggtcctcctctctctacttgaatactctcacaagtagggagctcactcccactggaacagcccattttatctttgaatggtcttctgccagcccattttgaggccagaggtgctgtcagctcaggtggtcctcttttacaatcctaatcatattgggtaatgtttttgaaaagctaatgaagctattgagaaagacctgttgctagaagttgggttgttctggattttcccctgaagacttacttattcttccgtcacatatacaaaagcaagacttccaggtagggccagctcacaagcccaggctggagatcctaactgagaattttctacctgtgttcattcttaccgagaaaaggagaaaggagctctgaatctgataggaaaagaaggctgcctaaggaggagtttttagtatgtggcgtatcatgcaagtgctatgccaagccatgtctaaatggctttaattatatagtaatgcactctcagtaatgggggaccagcttaagtataattaatagatggttagtggggtaattctgcttctagtattttttttactgtgcatacatgttcatcgtatttccttggatttctgaatggctgcagtgacccagatattgcactaggtcaaaacattcaggtatagctgacatctcctctatcacattacatcatcctccttataagcccagctctgctttttccagattcttccactggctccacatccaccccactggatcttcagaaggctagagggcgactctggtggtgcttttgtatgtttcaattaggctctgaaatcttgggcaaaatgacaaggggagggccaggattcctctctcaggtcactccagtgttacttttaattcctagagggtaaatatgactcctttctctatcccaagccaaccaagagcacattcttaaaggaaaagtcaacatcttctctctttttttttttttttgagacagggtctcactatgttgcccaggctgctcttgaattcctgggctcaagcagtcctcccaccctaccacagcgtcccgcgtagctgggactacaggtgcaagccactatgtccagctagccaactcctccttgcctgcttttctttttttttctttttttgagacggcgcacctatcacccaggctggagtggagtggcacgatcttggctcactgcaacctcttcctcctggttcaagcgattctcatgtctcagcctcctcagtagctaggactaccggcgtgcaccaccatgccaggctaatttttatatttttagaattttagaagagatgggatttcatcatgttggccaggctggtctcgaactcctgacctcaagtgatccacctgccttggcctcccaaggtgctaggattacaggcatgagccaccgcaccgggccctccttgcctgtttttcaatctcatctgatatgcagagtatttctgccccacccacctaccccccaaaaaaagctgaagcctatttatttgaaagtccttgtttttgctactaattatatagtataccatacattatcattcaaaacaaccatcctgctcataacatctttgaaaagaaaaatatatatgtgcagtattttattaaagcaacattttatttaagaataaagtcttgttaattactatattttagatgcaatgtgatctgaagtttctaattctggcccaactaaatttctagctctgtttccctaaacaaataatttggtttctctgtgcctgcattttccctttggagaagaaaagtgctctctcttgagttgaccgagagtcccattagggatagggagacttaaatgcatccacaggggcacaggcagagttgagcacataaacggaggcccaaaatcagcatagaaccagaaagattcagagttggccaagaatgaacattggctaccagaccacaagtcagcatgagttgctctatggcatcaaattgcaacttgagagtagatgggcagggtcactatcaaattaagcaatcagggcacacaagttgcagtaacacaacaagactaggccagctctggaatccagtaactcagtgtcagcaaggttttgggttatagttcaagaaagtctaaacagagccagtcacagcaccaaggaatgctcaagggagctattgcaggtttctctgctaagagatttatttcatcctgggtgcagggttcgacctccaaaggcctcaaatcatcaccgtatcaatggatttcctgagggtaagctccgctatttcacacctgaactccggagtctgtatattcagggaagattgcattctcctactggatttgggctctcagagggcgttgtgggaaccaggcccctcacagaatcaaatggtcccaaccagggagaaagaaaatagtcttttttttttttttaatagagatgggggtctcactatgctgcccaggctggtcttgaactcctgggttcaagtgatcctcctgcctcagcctcccaaagtgctgggattacagtgtgagccactgcgcttggccagaaatggttttgatctgtctgaactgaaccctactgcttaggcatagccccatccttgataatctatttgctcccaaggaccaagtccaagatccttacaagaaaggtctgccagaaagtaaatactgcccccactccctgaagtttatgaggttgataagaaaacataacagataaagtttattgagtgctaactttatgccagattctgttctatgtactttatttatacaattaactcgcttagttctcccaacatctctgtgagttggctactgtcatttatccttatattacaaataggtccagaggggttagtcatcttgtccagaatggtggaaccaggttaaggatcaggcagtctgggctgggcatggtggctcacatctgtaatcccagcactttgggaggctgaggtggcagattgcctgagctcaggagttcgagaccagcctgggcaacatggtgagacccccgtctataccaaaaatacaaaacattagccaagcgtggtggtgcatgcctgtggtcctaactactcaggtggctgaggtgggagaatcccttgagctcagaggttgcagtgagccaagattatgccactgcactccagcctgggtgacagagtgagaccctgtctcagaaaaaaaaaaaaaaaagaagcaagcagtctgggctgggtgctgtggctcgcgcctgtaatcccagatacaaaataatcattttgtaatatatcctgcttattagacagaacattttgatcactcatctgttccctaagttatagatttacgtccactttagaaatggcttgtgaggcaagtttaagtgaccgatgacagttttaaagcaaggtccatgtcatgttatggcataatttggtagaatgttctagtagtgtatcagttttcaggtggtaggcttgaggatgatacacacacacacacacgcaatgcaattctattattgcccaaagaaaatagacccattaaggaagtccaacttctgctgcgtggaccagtgctgccacatcacacatagaccaaaggcttaggtttttgtggttttggttatttattttatctttttattttattttatcttattttattttattttattttattatttgagatggagtctcactctgtcacccaggctggggtgcaatggcgcaatctcagctcactgcaacctccaactcctggggctcaaatgatcctccagcctcagcctcccgaatagctgggactacagatgcgtaccaccatgcctggctaatttttttattttttgtagagacagggtctcaagcatcctcccgccttagcctcccaaagtgctgggataacaggcatgagctgctgcactcagccatgtttttgatttttaacaaaattgtaacaccttaaaaaaaatgtataacaaggccgggcacggtggctcatgcctgtaatcccagcactttgggaagccaaggcaggcagatcacctgagatcaggagttcgacctgaccaacatggtgaaaccgcgtctctactaaaaatacaaaaaattagccagacgtggtggcacatgcatgtaatcccagctacttgagaggctgagacaggagaactgcttgaaccggggaggcagaggttgcagtgagcccagatcacaccattgcactccaacctgggcaacaagagtgaaactccatctcaaaaaaaaaaaaagctgtataacagcttgagatataattcacaataccatacaattcactcatttaaagtgtacaattcaggggttttcattccactccaacccactcaagcctaggcaaccactaatctactttctgtctcatagatttgcctatttggggcatttcatataaatagactcctacaatatgtggccttttgtgtctggcctctttcacttagcatgatgttttcaaggtttatctgtgttataacatatattggtacttcatttctttttatggacaagtaatattccattgtatgaatatataacattgtatgaatataccacattttatttatctgtttatcaggccaggcatggtggctcacatctgtaatcccagcactttgggaggctgaggcaggaggattacttgagcctaggagttcaaaaccagcctgggcaacacagggagacctcgtgtctacaaataataaaagattagctgggcatggtggcacatgcctgtagtctcagctactcaggaggctgaggtgggaaggatggcttgagccttggagatggaggctgcagtaagccactgcactccagcctgggcaacagagcaaaagcctgtctccaaataatgaatgaatgaatgaatgaatgaatgataaataaatatttgttaatcagttgatggataactggcttgtttctgctttttggctattatgaataacagtgctatgaacatttgtgtgcaagtcattgtgtggttgcatagtttcatttctcttgggtacattcttaggagtggaattgctgggagatgtgggaactctatatttaaccctttaaggaactgccagactgttttcccgaaggcttagttaggaaagttttacagtatttttggttttatcatctcttgatttcctaggatcataccctttatcataactttatctacttctatgctttggaaaggtttcaaaggaagaccgattaggtggtcagatttttctttttccttttttttttttttgagacagagtctctctctgttgcccaggctggagtgtggtggcaccattactgcttactgcagccttgacctctcaggctcaagtgatcctcctgcctcagcctcccatgtagctgggaccacaggcacgcaccaccacacctggcttttttttttttttttttttttttttttttttgtagagacaaggtctcactatattgcccaggctggtctccaactcctgggctcaagtgatcctctttccttagcctcccaaagtgcggggattacaggtgtgagccactcacccgaccaggtggtcagattttacgtgaggaactctcagcgcactcctccacttgcgttgccaatttctttgttattccaacaggcattccgggaacgttacatttgaagacatgtctgcatatctgaaattccagccctaattaattgactcattgtttgcaacctgtcaaaatttgctgacttgttttctgaaaaccatgacttcagctgctgaattattaatattcattgacttcactctgcagtaactgctgaactaggctgtaaggcctgtttgtgtgaataagataggacgataccatttgtatgcaaaagtttttcaagtgtctccttgataataggaaacactctggctaaatagccttctggttatatggttaaggaaataattgactagaagtggcatgaagaagcagacaacaaaagtcacttccatcagggaaccaagaccttcattaatccagagggaaaactagtgatttttctagtccagtgatgggcaattcgaagctcaaagtctaatttcagggagaaagatgaaaaacctgcatccagccgggcctggtggctcacagctgtaatcccagcactttgggaggtcgaggtgggtggatcacctgaggccaggagttcgagaccagcgtagccaacatggtgaaaccccgtatctactaaaaatacaaaaattagccgggcgtggtggcttatgcctgtagttccagctacttgggaggatgaggcaggagaatcgattgaacctgagaggttactgtgagctgagattgcgccactgcactccagcctgggcaacagagtgaggctccatctcaaaaacaaacaaacaaacaaacaaataaaatacaaagctgcatctggactgggcatagtgtcttatacctgtaatcccaggactttgggaggtccaggtaggattgcttgaggccaggagttcaagagcagcctgtgcaacatggcaagaccctacctatacaaaaaaaaaaatttttaataaaaattaggccgggtgcagtggctcatgcctataattccagcacttttgggaggtcgagggaggcggatcacttgaggtcaggagttcgagaccatcctggccaacatggtaaaaccccgtctctactaaaaatacaaaaattaactgggcattgtggtgcgtgcctgtagtcctaactactcgggaggctgaggcagaagaatcacttgaacttgagatgcggaggttgcagtgagccgagatcttgccactgcactccaacctggtgacagagtgagactctgtctcaaaaaaaaaaaaaaaaaaaaaaaaaatgagccgggcattatggtgtgctcctgtagtcccagctactcaggagacgaggtgggaaaattggttgagcctgagagggtgaagctgcagtgagccatgattgtgccactgtactccagcctgggtgacagagcaagaccctgcctctaaaaaaataaatacataaaaataaagctgcatctgggctgctcttctcaataaaagaaagaagtctataaatattttttatttgtcctgagttggcctttatttcaaaaaagaaagttgctcactataaattctactcaaaaacatttttcatttcatgaatatagaaatgaaggccaagagaggtgaaatggtgcctctaagtcacgtaactaacatgttcacaggtctcttgattctcagcaaagagcagtctcctctctgccagtctcctgcgtatatttgggctgctgtgtcaacatgcagctgttgaaacagaagtaaaagacatatgtaaacagtacagtcagattatttgagccagactgagggcttattaaccaaattaaaggcaaagctagaataattgtgtttgaagtggccttctcctaattatgttatgggtttctttcttcttttactttcgttaagtctccccaggacacagggtaataactaactacaaccaggaacagctgggtgtgtttatggggtttggggttttttttagcaagaagctagttttccagccagcaaattttcaatactttcctttctgccacctcctcactttcttcttctgctcttctcattccataattattgccctcagaacagttcaactcagcttcaacactggaatggtctcattctgctccatcacagaactggggattctaatcctttattattctgtgctccttcctctctctccagaggcaaaaagaatgaaaattggggccgggcgcagtgcctcacacctgtaatctcaacactttgggaggccgaggcaggtggatcacttgaggtcaggagttcgagaccagtctggccaaaatggcaaaaccccgtctctactgaaaatacaaaaattagccagacgtggtagcacatgcctgtaatcccagctactcgagaggctgaggcaggagaatcttttgaacctgggaggctcaggttgcagtgagctgagattgcaccactgcactccagcctgggtggcaaaaaaaaacaaacaaaaaaaaacaaacaggaatttgtggggaaaaaaaatagtgaaaatcaaatttctttctctccattgtgaactgtttcgggattcttgacagaggcatgccacctttgagggcaccaatgtcatcttttcgactccatctttcattctaatctccttctaccccggctgattgacaatgctgccactgatccctgcttgatccaccctggccattaactcaaatgagccttttgagagatgtaatttggcttaattgatttaacaagctgggtggcataagtcagtttctcttcacttagatctttaaactgccaaggtctttcctgccagtccatttgttccctacacagtgactgcaatggaatgacaggggcgtcatctctccttacagactgttgtgaaaccactgtggacacccctgcaccaaagcctccaaagggctcttcggtgcaggagccttaggtgaggccctgagtcctgatgggtattagtgtcgatcggggagaagctgacacagcagccttggtctttgatctggctctttgagccttgtcagcaggctcactagctacagcagccaccaactgttatctccagaactatgccctttctcatttttcacctgtgctctgcacagctataagatactctgcacagcttctaggaacttccaaagggtaaatgatcccaaatgtaaagatttcatcaactggtgagttaatttatcctctagttaggagatagctgaactcaacccgctctgttgttgttggttgagacagggtctcactctcgcccaggctggagtgcagtggcccgatcatggctcgctgcagcctcaacctcccaggctcaagtgatcctcccacctcagcctcccgagtatctgggtctacaggtgtgtgccaccatgcctggctaattttggaggttttttggtatgtatttgcagaaatgaggtctacttatgttgtccaagctggtctcaaactcctgggctcaagcaatcctcccacttcagcctcccaaaatgctgggattataggcgtgagccactgcacccagctcaggtctgtcttaagtagatttgtcactctaaattccaaaatctttccctcccatcaggtctactttttgaaacaactggagttgtcccatctcagtttacataagtaaaatgactcttgactccggccctcttgtagagaccttgagctgaatatgttactaggtacccacagatgtgcacgtggttaaatacaggataaagtgtgcagccagattgagagtcttagccaaagagtgagggggaaatgggcagggctggcagagagccacctattgttagtttggtaaataaactgctctccccaaaaaaggctctgggtgtacttcatattgttgttaaatcaccagggagaggaaagagtaaaacaaaacacattctcagatgaacaaagaacgtagttaagacaaactctgcctaacactggtgcttaatgattctcagcttggattgcacttcttcagagaaggtggaagagatgacatacttctctgttctctcattgctgtaaaactcatgtccaatactgttggtacacactcccattttaatttctgtttgttactaatgaaaaagatcctaatttaattgtttctcactgtccaagttaaggttgagaatggaaaaaaaaaatcccaggtcaaatagccttctgatgaggttgttttgtttttgttttgttttgttttgttttgtttttgagatggagtctctctctgtcacccaggttggagtgcagtggcgtgatctcggctcactgcaacctctgcctcccaggttcaagcgattctcttgcctcagcctcccaagtagctgggattacaggtgcccaccaccctacccagctaatttttgtatttttagtagagacagggttttaccatgttgcccaggctggtctcgaactcctaacctcaggtgatccacccatcttggcctcccaaagtgctgggattacaggcgtgaaccaccgcgcccagcctctaatgaagttgttaaggtaagaatttattagcaaagtgaactttaaatcatgtgtaaactttaataatagttcattccactgtgtgtttccttgcttcctggttgtcaaatattaattcatacccaggatatattattttaaaaatacgatatagcccctaaagcttgctgcaaatatctatccacctcctatttcttacagttccttgattcaatgtcctcttagtttcttgatctgactgttcagtttcgtattctgaattcttgtgttccacgtttaaaaacaaaaacaaaaacaaaaaaaaacaacaaaaaatgtgtgagtattcttctgtagaaatgaggtctacattgcagcctgattctgtaatagtaattgaagagtcagtgttacttttctgtaaatgtttctttggcatctctgatttatttggcttctgaaatctaatttcttcctccttctttgaaaaagtaggtcccttccacttggtttgttgtggtgagccctgagcaatgcctggagattgatcttccagcagacagtggaatgattccaggaaggttttagcacccggcctgtctttgcagctctgcagtcctcaaagtctccaaactctgatgcgagcgttcacattttcctgtgcacagggacaaaactacgaagactttttgctgcaaaacgaaaacccattggctgatctaccttgtaactgctatctactttatatactcaaatagctgtgtttaggatcgaaatgatcaggtctggaatatactgcagtagatactgcaattcacaagcaattttacagaagaagcacccaaccccgactctaaactatgtttgcctttcctcaagagtcacttctaaactttttttcacaacacacacttttcatagttgtaacctttccatttggtgttttgttttggggttttttgtcacttaaaataatctaatctacacgttccccagagccagcagaggctacattcctgtcatttaaaatcatttgctggtgttttccttatgtcactataccataatttgctgggccatttccttatttggtatttggattatttccaattcttcactcttataaatagcggcacatgaacatctttgcacaagttacattttttcccttttgggttatttccttggggtgtattcccaaaactggtattgctgggtcaaaggtttgaaaagtttcatagctcttgttacccactgccagaacgttctccaggcacattgtggcatgtttgagcatttcaaatgtttaagtaggtttcccacgacataaaataatattaaccatcttttttttctgatttttccataatcttcatgagggaaggaattgcaaaatttcaaaacaaaataaaaataaagatgaaaaagcgctatttctgtagccagagatgagcccttttaggctagcttgattgtaatgtcaactgatgaggatctgagactgagacagttttcgggagaatttaaaccctactagtggcaagcaattaggaaaacttgttaagaagagtagatagggaggtgaaaaataataaaaaaggttgcattgtctttgctcagctacctttagggtaatgtcctcagcagagagaaaaataaactttctgtgcctttcagattcaggttatccattatgtttaggtgacttctaaggattgtgaatgcttgcagaccttgatctcctcggcttaagaactgaaaggttttttggttttgtttttggtttttattttattgtaacagggtctcactctgtcacccaggctggagtgcagtgatgcaatcatggctcactgcagcctccacctcctgggctcaagggaccctgccgccttaacctcccaagtagctgtgaccacatgcacctgccaccatactgggcttttttttttttgaggcagcgtctcgttctgttgcccaggctggagtgcagtggtgggatctcggctcactgcaacctccgcctcctgagttcaagcgattctcctgcctcagcctcccaagcagccagaattacaggcacctgccaccatgcccggctaatttttgtatttttagtagagacagggcttcaccatattggccaggctggtcttgaactccagagctcaaatgatctgcctgcctcggcctcccaaagtgctgggattacaggtgagagccaccgcacttggccttctactctgttttgaaaaaaatcaattttaaaaatgcaatggttcgcaatcagcctgggcaacatagtaaaacccatctctacttaaaatacaaaaaaattagccaggcttggtggtgcacgcctgtaatcccagctactcgggaggctgaggcaggagaatcatttgaaccagggaggcagaggttgtagtgagccgagattgtcccactgagtgtccagtctggacaacacagcaagacactgtctcaaaaaaaaaaaaaaaaaaaagcgctgcgcacggtggctcacgcctgtaatcccagcactttgggaggccgaggcgggcagatcacgaggtcaggagatcgagaccatcctggctaacacggtgaaaccctgtctctactaaaaatacaaaaaattagctgggcatggtggcgggcgcctgtagtcccaactgctcaggaggctgaggcaggagaatggcatgaacccgggaggcggagcttgccgtgagcccagattgcgccactgcactccagcctgggcgacagagcgagactccgtctcaaaaaaaaaaaaaaaaaaaaaaaaaaagcaatgaatttctgtatattcttcatgtaaatcaccaactacagtattcacatgttgccacattgctctatcaatctctcgctatatatgtgtacatattcttcgtttttgatcattcgtttcagcaaaatttacagtcaccatggccttcacttctaaataatttcatgtgtctcccaaaagcaaggacattttcttacatagctacaacaacatgtgttcttttataaatgaacctcagtttcaaaaaaaaaaacaacactcagtttaagaaaaacaaaaaattaaaaataaactgaggcaaattaattattttctgtttcaatatcttgcactctgggttcaaagacctccttgctcgctgaggctcacctgccctgcctgccgctcgtccatacccccaagctgtggcccatccctgcaggggaacattccggaagacccttgactccttggctctgctgagcctcagcttcctgctggggctttgaatgtcttagtgccaatctactcgtttccttccttctctgacagccaacaagttgatcattcaattaacagaacacttagattactgtcaacttaaagttaacatctttattactgtaataagaaatttttaactctaaaggtttcaaattatttgttcataaaatcccttatgattaccacttatgtaagcagggtccatcttttaatttaataatttttcagctggaacaattcgttcatttcacaagtatttatcaagcatctgctatattccagacatttctggaattaaaatagctagtataggccgagcgcggaggctcacgcctgtaatctcagcactttgggaggccgaggcagatggatcacctgaggtcaggagttcaagatccgtctggccaacatggtgaaaccctgtctctactaagtacaaaaaattagccaaatgtggtggtgcatgcctgtaatcccagctacttgggaggctgaggcaggagaatcacttgaacctgggaggcagagattgcagtgagctgagattgcgccactgcactccaacctgggtaacaagagtgaaactccttttcaaacaaaaaaaaattttttttttttgtaaagacaagggctctctatgttgcccaggctggtcttgaacacctagactcaaatgatcctcctgcctcagcctctcaaagtgctaggattacaggtgtgagccaccacacccagtttaggttcttaatattttaccccaaacctggtcatctctacaattctgtatctcagtgaatggtaagtccatccatccacacgctatcttcctccttcccatccatcctccatccatcaaatcctcttacttttaccccttaaatatctctaaaatctgccatttcttgccatttctactgctgcctaccccagataaaagtcaccaccatcaatggcaatggcctgcaatggccttctttttttctttttttttttttgagacggagtttcaccttgttgcccaggctgatcttggctcactgcaacctccgcctcccaggttcaagtcattctcctgcctcagcctcccaagtagctaggattacaggcccatgtcaccacgcccagctaatttttatatgtttagtagagacggggtttcaccatgttggccaggctggcctagaacttctgaccacaggtgatctacctgcctcggcctcccaaagttctgggattacaggtgtgaaccaacgagtccagctgcaatgggcttcgtaaatgttccctgcattcactctcgcccttttcatatccattcaccagaagactgatggagtgatctttttaaacccaaaatctgatatcacactcttgcttgaaactttttaatggattatcactgttcttaggatataaatctttattatgaaaaacttggccaggcgccgtggctcatgcctgtaattccagcactttggaaggccgaagagataggattgcttgagtccaggaatataagaccagcctgagcaacgtagtgagacccccgtctttattttttgcttttttgtgtgttttttcatttctgctttttttttttttttttaagacggagtcttgctctgttgcccaggctagaatgcagtggcttaatctcagctcactgaaacctccacctcccaggttcaagcaattcttctacctcagcctcccgagtagctgggattacaagcacacaccaccacatatggctaatttttatgtttttagtagagactgggtttcaccatgttggtcaggctggtcttgaactcctgaccttaagtaatacacccgcctcggcctcccaaagtactgagattacaggagtgagccaccctgtctggtctcacttctttttgtatctttttccttcatcttttattttctacccatctctccatttttaaattaatacatacataaattttaaaaaggaaaaaaacttgtacatgaatattcagagcaggattattcataatagctaaaaagcagaaacaacctgaatgtccatcaactaatgataaataaacaaaatatagcctagccatagagtgcaatattatttggccatggaaggaatgaagtatgaatacatgctagagtgtggatgaaccttgaaaacattatactaagtgaaagaagcaaggcacaaaagatcacataccatataattccatttatagaaatgtccagaatcggcaaatccatagagacagaaagtagattggtggttgcctaaggctagatgtttgggggaaatggagagtgactgctgaaggctgcagggttttttttttagggtgacgaaaatgttctcaaattgactgtggttatgtacaactctgtgaatatactaaaaaccaatgaattgtatttttttctttttttaatttctttcttttttttttttttttttgagagagtctcactctattacccaggctggagcacggtggcatggtcatagctcactgcagcctcaacctcctgggctcaagagatcctcccaacttagcctccagagtagttgggaatacaggtagataccacaatgcctgggtaactttttaatttttcatagagatgaagttgcactgtgttgctcaggctgatctcaaactcctggcctcaagcaatcctcccaccttggcttcccaaagtgctgggattataggcatgagccaccatgcccggctgaattgtacattatttatttattttattttatttttttgagacagagttttgctctcatcccccaggctggagtgcaatggtgtgatctcaggtcactgcaacttccgcctcccaggttcaatcaattctcctgcctcagcctcccgagtagctgggattacaggcacccaccaccacaccaggctaatttttatatttttagtagagatggcgtttcacaatgttggccaggctggtctcaaactcctgacttcaagtgatccacccaccttggcctcccaaagtgctgggattacaggtgtgagccaccgcaccccagccacagcatttcttttcttttcttttcttttttttttctttttgagatggagtctctctctgttgccccagactggagtgcagtggcgcaatctcagctcactgcaacctccacctcctggattcaagtgattctcctgcctcagcctcccaagtagctgggattacaggcatgtgccaccatacccaactaattgtatttttagtagagacggggtttcagtatgttggccaggctggtcttgaactcctggcctcaagtgatccacctgtctctgcttcccaaagtgctgggattacaggcatgagctacctcaactggctaccaaattgtgcattttaaatgtgtgaattttgtggtgtgtgaattatatctcaataatgctcttaccaaaaaaaaaaaaatctttatatggcctctgaaagcttacctcagctggaccttgtctaccgcacctcacctggtctccttcacctcattccacaaagcacagccaatgtcatcttggttcctccaatgcaacacactccagccctcctccgagcttgggcttttacacaccccccttcttagaacactcttctgcctcttcacataattcagtcctccacattggtatcactttctcaaggaagcctccctgcccacccaccatgagtcatgatcaagttcctcttctgggcctgccaaagcaccccttttactttgctctctaccaaacgtcactttgtgattatttggatcatgtccgtcttccccactagactaggccccatgagtgcagctccatgcctgctttgctcactcttgcacttaaaccctgtgcctagccctggcctaacacatgaggaggactccagatatcttggttgaataataaatgagcaatatattactgtttgcccctaacttggaaaacaaatgataggttcaacaattctagagctccacaaatgactcagcaaaaacatgttcggaggcactcccaacgtgaaattagaaggttggaaactcagaggacgggacaggcttagatagaaacattggcctcttcccaggtaagttctccccaggaggtggggagcaaactctctgagcagccagttacagggaactcatgactaagctctgttgctgtttatcaagatacacactgactctcagaagttctagcgtgaaccaaatcctgcttcaaccccatgggctttcagtgtaggactttttctttttgttggtgatcacacaccctactggtggcttaaccaattacattgcctcagcccctgtgacactccagctccgcgtcccctttatgatgcttcaaatatcataaaagcagagaaaaatcatatgtcatatatcagaaaatcatatatcaacttttttttattttgaggtctttcacacactgaacttattttaatcataattgtcaattataaataaacataattactatgttccttttttgatgtcaaattgttgcaatttggacagtggcttccttatccttctaccattgctggcctaaaatccttgtgttctaggcccattccaaattttccttgttccaagacacagaatcagccacccactaagaagtctcatttccttttgatgggtgcacgagagtgggaggttagcagaagaaatgctgttaatgggctaggtgcagtggcctagcctgtaatcccaacactttggaaggctgaggcaggaggatcacctgaggtcaggagttcgagaccagcctggccaacatggggaaaccccatatctactaaaaatacaaaaaattagctgggcgtggtggtgtgtgcctgtaatcccagctactcaggaggctgagccaggagaattgcttgaacccaggaggcggaggttgcagtgagctgagatcatgccactgcactccagcctgggcaacagagagagacttcatctcaaaaaggaaaaaaaaaaaaagaagaaggaaaagaaatgctgtggccagggcatggtggctcacgcctgtaatcccagtactttgggaggctgaggcaggtggatcatgaggtcaggagctcaagaccagcttggccattatggtgaaaccccatctctactaaaaatacaaaaattaggcagatgcctataatcccagctactcaggaggctgagggaggagaatcacttgaacctgggaggcagaggttcagtgagccaagattgagccactacagtccagcctggcaacagagcgagactccatttcaaaaaaagaaaaaagaaaaagaaaaagaaatgctgttaatgaactgtattttagggtcagagccaggaaattatatttctcttaaagcttatgggttcacaataatgtttccaattgaactctatgttgtaattttttattcaatataaaatattttcaggccaggcccggtggctcatgcctgcaatcccaacactagaaggcaagacgggagaattgcttgagacccagagttcaggaccagcctgggtaacataccgcaaccccctctctataaaagaaaaaaaagatataattgttttcatttattttatctgcaatattcctgcatagagatttaatcttcaccctcactataattgcatttcctttactagccctcatttgccttgccaaccgccattataccgtccctttgctgatggtgatgtctgttggcttggtctccttgttctggttgaccagactatcctcctgttataaacagcaggaaacacaaccccaaaacacacatacacacacactggaagcctacatgaatttcacatgcatcgtttgaggcagcctcctgagagccagtcatccttccaagacagtgactgcttcgggagtaaaatcataactgagagagtctcagggaactttgttgttgttttactgagttgacatttgggaagtttaaggtctttattgctctgacagagtattttaacttaattttttttgttgagacagagtcttgttatgatgctcaggttgctctcgaactcctgggcttgagtgatcctcctgccacagcctcctgagcagctaggattacgtaggtgcacgtcaccatacctggctctttatcttgctttttgtcattagaaaagtatcacacaaatgaattacaaagaagatcatttcattcagaaatgttggaaactactgaaaagtataaagatgaaactaaaaatcactccaatctcatcatccagaaataactgagggccaaggcacagtggctcgcatgtgtaatcccagcactttgggaggctgaggcaggaggatcacttgagcccaggagttcaagacctgcctgggcaatatagggagactctatctctacaaaaaaacacaaaaatacgaaattacaaaagaaacaaataactgaagctaacattttgaaaaaagaagtaggccgggcgtggtggctcacgcctgtaatcccagcactttgggaggccaaggtgggctgatcacctgaggtcaggagttcaagaccagaccgaccaatgtgatgaaaccccgtctctactaaaaatacaaaaattagctgggcatggtggcacatgcctgtaatcccagttactcggggactgagacagaagaatcacttgaacctgggaggcagagattgcagtgagccgagatcgcaccattgcactccagcctgggcaacaagagtgaaactccatctcaaaaaaaaaaaaaaaaaaaagaatactgagaatatgaaaaacctttttttttctagatccatcaatgcctcttgaagagagtatcaaaaatcaatatgaaactgaaagagctactgaactgcagacaaaaatttcatcagatacatcagagatttctctaaaggttaaaaagaaacgtgagaaatattaaaagtcaattgcctggtgtggtggcttgcacctataatcccagctacttgagaggctgaggcagaagaatcctttgagcccagaagttagagtttacaataagttctgattgcactactgcactccagcctgggccacaagacaagaagactctgtctcaaaaaaaaaaaaaaaaaaagagtcagttgtactattctgctttgtggttttgtgtattaatctgcaatttatagagttttaatgaaaagtcatcagtgttggtagaatgctgatttaaatgtatttatgagaaaatgtcaccttgtcacctgagttaaaacacacaatcaaaatggcagggtgaaaactgtggactccaaagttcatgctttcactaatttcttttctttttaaaaaaacatttttggccgggcgcagtggctcacgcctgtaatcccagcactttgggaggccaaggtggatggatcacaaggtcaggcgattgagaacatcctggctaaaacagtgaaaccccatctctactaaaaatacaaaaaaattaaccaggtgtggtggcgggcgcctgtagtcccagctactcgagaggctgagtcaggagaatctcttgaacccgggagttggaggttacagtgagctgagatcgttgccactgcactccagcctgggtgagagagcaagactcaattgcaaaaaaaaaaaaaaacctggcaggtaactgtgttttgttttattcttaactaatgtttctttttttcttaatccagtgaaatttagcaatggggggttgtataccaactttagtgacactaatgttaataagttctgatgacccactaccatcggaccagcctaatgtttcttaatgagaaacatttctttctgggtggttaaacttaatcaaccgtcccataaaaacaagaagactcctctgctgcctaactaaacaatcaaaaaaccaattttttaatttaaaaaaaaggtttaagattcaagcctacttttaggctcatcctctaagagaaatgagtaagcaaaggctgagctataatcacaacatccagagctgcactcagtcctgaagcaccagaacacacacatgggctgcctgagctcctcaagtgcccctgctgccgccactgttaccagaaagaaaaaaatgaggttggttcgcctggcaagtaacaaacgacttgccatgagaacacagggttttttgttagttttttttgtttgttttgggggtgggggggtttgagacagagtctcactctgttgcccaagctggggtgcagtggcgtgatctcggctcactgcaacctccacctcctgggttcaagcgattctcctgcctcagcctcccgagtagctgggattacaggcatgtgccatcacacctggctaattttgtatttttagtacagatggggttttgccatgttgcccaggctggtcttgaactcctgacctcaggtgatccacccgcttcagcttcccaaagtattaggattacaggcatgagccaccacgcctgttcggagaacgcaggttttgatcagtaggagttttactcggcacaagtaaggaggacactgggcgtgttctccaaagcagtgtctccccgagggaaagtaacagaaaggttttccagggtgatagaaatgggagagggtgcatcatcgctagtagaggaggggtcccaattgtccagatgcagtgaggcatcatgccagcccataggttacacgtgatggtaatgaagccgttgctcctgctggggtgcagactctagcacagtcatgaggaaagttcactctggttcctctatgagttggggtctgtcaggagctggttccaacaaacaaggggaccacattccacacagggtttagggaaaacaggctgcagggcgggaggctgtagaactggctgattgctcaagttgactaaacccctataatccttggagacccttcctgtctgcttacagcacctccccattcccccaacacggccacagcaatgaagggcccagcaaggcacccccagaaccttgttccagccccagcagagcatccttcactcctctctttccctcgctcctcccttcaatcatcaagtatgtccaaaacccactcctcccccagatccgagtctccatctcctctcaccaggattacagtgccagcctccaaacagatgccgcctcctctactccctcctttgcctccccctacagtctctcaacacagcagctgtgctgattacttgaaaatgagggcctggtgcggtggctcacgcctgtaatcccagcactttgggaggctgaggcaggtggatcacctgaggtcgggagttcgagaccagcctgagcaacatggagaaaccccatctctactaaaaatacaaaattagctgggcgtggtggtgcatgcctgtaatcccagctactcgggaggctgaggcatgagaatcgcttgaacccaggaggtggaggttgtggtgagccgagattgcaccactgcactccagcctgggcaataagagcaaaactccatctcaaaaaaaaaaaaaagaaagaaagaaagaaagaaaagaacgtcagacactggccttgtgcttaaaacctttcatggggtgggatctcactcacagtaagagttgtaaccttacaggggcccacaagacccctttctctctaacttcatctcctcccactgttccctgcagcccccactcagcccctccagcccctgcggtccctggtgaaggccaagcacactccagccatagggccttggccctgcccacccctccagtgttctacccccagatacctgtttgcctgatgccctcatctctggcaagtctctgcttatttctcagttccctcccctcccatccactcccctcccctcccctcccctcctcttcccatcgtctttccctcccctccctccctcctttccttccttccttccttccttctttctctttcttctttctctctttctttctctttctttcaaaggagtttagctcttgttgcccaggctgcagtgtaatggcacaatcttggttcactgcaacctccgcctcccagcttcaagcgattctcctgcctcagcctcccgagtaactgggtttacaggtgcccaccaccatgcccggctaatttttttgtatttttaatagagacggggtttcaccatgttggccaggctggtcttgaactcctgacctcagatgatcctcccaccttggcctcccaaaagtgctgagattacaggcatgagccacagcacctggcttttttttttttttgagtttcaccgttttttgggggtctcactgtcgctcaggccggagtgcagtggtgcaatcacagttcacagcaggctaggcttaagtgatcctcccatcttagcctccagagtacctgggactgtaggtgcacaccaccacacctggctaattttttttgtatttttttttttagagatgaggttttgccatgttgcccaggctggtctcaaactcctgggctcaagcgatcagcctcagcctcccaaagtgctaggattacaggcatgagccactgaccccagcctgtttctgtttcttaatgagatcttccaggaccaccctatttaaaatttcaacccaccctactaccttcctctccacactcctacttcctggattcccaattctccttcccttcccttctacttttccttttatgtcccccttagtgcttatcactttttaacacaatgtataatggcggggcaaagtggctcacgcctgtaatcccagcactttgggaagccgaggtgggcagattacctgaggccaggagttccagacagtgtggccaacatggggaaacccctgtgctctactaaaaatatggaaattagctgggtggtgatgcacacctgtaatcccagctactcaggtggctgaggcacaagaatcacttgaacctgggaggcgggggttgcagtgagccaggatcacaccactgtaatccagcctgggtgatagagggagcctccgtctcaaaaaaaaaccaacataatgtatcacttgttatgtgtactgtttattctgagtgcctgcatcactagaacataagctctactaggaagggaattgttgttttgttcactaatgtatccgctggcacatggtaggcactcgatatatatttgttgaaattggtcaatgctcatgccacagcaattggtaaataatttgaatatattgcctgaaaatatcctataaaactatcctataaaagatagtcaaaggaaaaagaaacaatgaagcacatcatggacaaatgattgtggttagcaacaatcaactctttacattcaaaatgattatacaggtctggcacagtggctaatggctgtaatcccagcagtttgggaggccagggtgggtggatcacctgaggtcaggagttcaagaccagcctggccaacatggtgaaaccccatctctactagaaatacaaaaattagccaggagtgatggtgggcgcctataatcccagctacttgggaggctgaggcagaagaatcacttgaacctggaaggcagaggttgcagtgagccaagatcgcaccactgcacccagtctcaaaaaaaaaaaaaagaaaaaaaaagattatacataaaatcagagtatctgtccgtcccactgctcctgccaaccttgccttacctaactgcaggcagcttgcctttgttggtgtaggaagtgtactgctcctgcttcattaattctcaaattcatttcaaaatcatagattgctggccaggcgcagtggctcatgcctgtaatcccaacactttgggaggctgaggtgggtggatcactgaggcccaatgagggcaacatatgagcaaagctgggctgcaaagactggcttctgttggcatcagcagtcgcctgggctataaacattgacaagattctcaacacaaacaaaacagagatactggtagacaaacagcaaacaaacaatatttgatttgattcgatttgttggatgaactccagcaaaataagagaacaattcaagaaagaggaatatataggatataggaaagagtgaaactgaccgaagactgccgataaagacattgcaacataacagctgctttacgtgatgatgaatgttgaagtcctcagtgagctgcaggccttaagtcttgtcttctggccgggcgcggtggctcatgcctataatcccagcactttgggaggccgaggtggttggatcacttgaggtcaggagctcgagaccagcctggccaacacggtgaaaccccgtctctactaaaaatacaaaaatgagccaagcatggtggtggacgcctgtaatcccatctactcaggaggctgagaatcgcttgaacccaggaggcagaggttgtagtgaaccgagatcgcaccactgtactccaggctaggtgacagggcaagactatgtctcagaaaaaaaaacaaaaaaagagaaatctccggtttggctagaatgatggagttaaatgcacaaaatatcaagcatcaatttaattggagaagaactgaaactcgtcaaaaatagagatgataatttccagaaggccatagcttgtcccttgatttcctgcttgtgttttgggaaacgccatattccacatcccatgggcaagtcatcagaagccacaagggcacaggacaaccagaagcctcctttcaggctggctgaatgaggggctctttaatctttttcttctggcggaggccttggcagccacaggctcacagcaccctctgctgttaaattgcaaaggatggtgcctgagttttgagactgagactgctaaaggattctggtctggggcaggaagaaaattacatgagccagagatattcaaaattgttttaatatctctaaataagtaaataaagagccaggtgtggtggtgcccagttacagtcctggctactcgagaggctgaggtgagaggatcgcttgagcccaggagtttgaggccagcctgggcaacatagcagactccgtctctataaaaaataaatggggctcatgcctgtaatcccagcactttgggaggctgaggtgggaggattgcttgaggccaggagttcaagaccagcccgggcaacagagagagtccttatctccacaaaaaaaaaaaaacttttaaaattagccggacatagtaatgtgagcctgtagtttcagctactccgagggctgaggcaggaggatagatggagcccaggagttcaaggatacagtgagctacgttgtgccactgcactccagcctgggtgacagagcaagacctcatgtcaaaaaaatgtttaatgttcttaattgattaatgttttaaaaaattgtttcatgcaaaacctcaggatggattaattttgctggtgacaggtagcaatgataaagcaaagaaaaattatgcagctaaactttttcaccaaggcagattttcagccttttccaagccaagtggaaatccccaattcacccccaccaaggttccaaaatcaggaaaaacacactttctagcagtgttagtgaaactcatgtaacactgtctccatcgagatcgagccctgagtaacaaaaagcaggagacaaacaggcttagaattatatgtaggggattaggggcatagctttcagaccccatagggaataaacctctagcttttcagttccagcattttgatatgcctacctgccctaacagaggtaaaattagaggctacatggcaacattacaatggaaggtttttacttctatttataacttgcttatttggttatttttccttaccaaaagcacaagacagcctcaatatccttaaataccccaagtcctaaaattacttatttaaccctgagagatctagtttataagatagaacagctatcagccatgtaccatttgtatgctctttttttttaagtcaatcaatttttattcaaggaattccatttgtgttgtgatttcttccactgtccatcaaggtcactttagatcttctaaagatctggagtcaaaagatttatcttcaagttagccctttttaatgaaactgatgcttattttaatccagttgtcctgtcagcccataattttttttttttttttttgcttctgtcatctccttttaatatggatatactgaagaagacttcaaaattcaccaagaatctttgggatctaatttctttttttttttttttttgagacggagtctagctctattgccagactggagtgcagtggcatgatcttggctcacggcaacctccgcctcccaggttcaagtgattctcttgccccagcttcccgagtagctgggattacaggtgtgccccaccacacccagctaatttttgtgtttttagtagctaaggggtttcaccatgttggccaggatggtctcaatctcttgacctcgtgatccgcctgccttggcgtcccaaagtgctgagattacaagtgtgagccaccgcgcctggccacaggatctaatttcttcaaccaatttactttaaggtcatttttagtgtaggtggatctgcctgattctcaatttgacaccctctctaaacatgaatttagttcaaatcatattcattcctaagcgatcgcactcaagaatagtacagatgtgtggaatatgccaatacctttaactccagacatcatgctctcaagataaaagcctttaaaacaaaaagccatcctatgtatcaagtcaacatgaaattggaatataaaattaatacaactgaggatttccctcgtatcccatgctgtttaactatctattctacagtcctagaataaactttgtttttttttgttttttttttttttttgttttgagacggagtctcgctctgttgcccaggctggagtgcagtggtgcaatctcggctcacaggaagctccacctcccgggttcacgcccttctcctgcctcagcctcccaagtagctgggactacaggctcctgccaccatgcccggctaattttttgtttttttagtagagacaggttttcaccgtgttagccaggaaactttttttttaaattaagagacacggtctgtctttgttacctaggctgggggtacagtggtgccatcaaaggtcagtgcagcctctgactcctgggctcaatcctctttccttagcctccccttcctgagtagctgcaactacagacacatgccctgatatccagctaatttttaaatttttgtggagatgaggtgttactttcttgcccaggctgatcttgaactcctggcttaaagcaatactcccacctcagtgtgggcattgcaggcatgagccactgtgcctggcctggaaccaacctttatggctatcaatactcccatcagttaactgtctcaggtatcaaaatatcccttcctgtatgtatcaaaactcatgctgaacaatgagttctgggttgcaaaagaggatttatttgttgcacctatccataagtctttgtccacaagttaaacaaaaacatacataagtgcagcgtgtgctctttttaagtacattagtagacatactactgagaggccacactgcacggggttaggtaagtggactctggagccagattgctagttcaaagatgtgcccttccatttactaagtgactttaggcaaactccttctcttggtgtctcagtatcctcagctgtgaaatggggatgacattaagaccgatttcggccgggcatggtggctcaagcctgtaatcccagcactttgggaggccgaggcgggtggatcacgaggtcgggagattgagaccatcctgtcgaacacggtgaaaccctgtctctactaaaaaacaagaacttagccgggcgtggtggcgggcacctgtagtcccaactacttgggaggctgaggcaggagaatgacgtgaacccgggaggcggagcttgcagtgagccgagatcacgccactgcactccagcctgggtgacagagtgagactccatatcaaaaaaaaaaaaaaaaaaaaagacctatttcatgggggttgttatgacgattaaatgagttaatttttataatgtgctcagaacaacgcctgggagaactatataagtgttgatttaatgccaaccaataattaaatgatgccaaacaataatacaataaaaattacacgatggtttgaagtcggcttttcactatttagacttgcaactgacagacgttttttgttttgttttgttttgttttgtttcgtttccagatggagcttcgcttttgttgcccaagaataggagtgcagtggtgtgatcttggctcgctgcaacctccgcctcctgggttcaagcgattcttcagcctcagcctcccaagtagctgaaattacagacgcccgccaccacaccggctaaattttgtatttttagtagagacggggtttcgccatgttggccaggctagtcttgaactcctgacctcaggtgatctgtccacctcagcctcccaaagtgctgggattacaggtgtgagccactgcgcctggccttgacagaggtttttattaatcataacttcttgtttgtcttcatgaggtctctttcaggctgttatgccttggtcaccctcttctgctgaggtctaacaaagggcttactttctgctaaggggaagaaaagttggcctcatggggtcagaagaaatggtttaacagtggtggaagaggctcttagagtgtaaagtgacgcaagcaagtttcatgtcagtcttattctttgcttctttgtagctgccacataaaaggtgcccaacatatgtatggttcattgatgaatccagtaaccccaagacaatggtcatcttctgtggctggcagacaattcacagctctggaatttctataaagaaaaggctaggatgggcatggtgactcacgcctgtaatcccagcactttgggaggccaaggcaggtggatcacgaggtcaggagttcgagtccagcctggccaacatagtgaaaccccatctctactaaaaatacaaaaattagccgggcgtggtagtacacacctgtagtcccagctacttgggaggctgaggcaggagaattgcttgaacccaggaggcggaggttgtggtgagctgagattgcaccactgtactccagcctgggcaacagagcaagattccatctcaaaaaaaaaggagagaaaaggctgaagtccgggtgcagtggctcatgcctgtaatctcagcactttgggtatgtttgcttgtttgtttgtttgacatggagtctcactctgtgacccaggctggagtgcagtgacatgatcttggctcactgcaacctccacctcccgggttcaaacgattctcctgcctcatcctcctgagtagctgggactacaggtgcgcaccacaatgcccggctactttttgtatttttagtagaaatggggtttcactatgttggccaggctggtcttgaactcctgacctcaagcgatcctgctgcctcggcctcccaaagtgctgggattacaggcatgaaccactacacccggccataatctcagcactttgggagactgaagcaggaggattacttgaacacagttctagaccagcttgggcaacatagtgagacccctgtctctacaaaaattttaaaaattaggcgaatgcggtggcatatgcttgtagtcccaactactcaggcagctgaggcggaagaattgcttgagtccaggagatcaaggctgcagtgagacacgatcacatcactgtaccctgtactccagcctgggtgacacagcgagaccctgtctcaaaaaaaaaaaaagaggggggcttatgcatggccatgtggttggaagggaaaccagcagacttccatcaagtaaagaaaaatatcaagcttttaaagaattaaagttaactttattcagaagtcttgctgaagactatagattgaggcctctagcctaggagcaggctctggcccagtgtttcagatccctgcttatatataggggtggaggttctgtatgtgcaaaatcccatcagacttgctcagaattacatgaaagcagaatcacagcaagatttgtgtgtcagagtacatctggtcctagatcacagaggcatcatcactaaccccgtcagatgtcatcttatgtataggaaaagccagggattaaggccattctttttttttttttttttttttttttttttgagacagggtctcactccatcacccaggctggcatgcagtagcacaatcatggctcactgcagtctcaacctccccaggttcaggtaatcctcccacctcagccttccaaatagctgagactacaggtgcacaccaccacgcccagccaattgttgtatttttttgtagagatgaggttttgccatgttgcccaggctggaggtcattcatcttttaaggaatgcagtgactccggcaagaggacaagagacatgggggctgtgtattctgttttgttgtcttcaaagcatctttctggagagctgcaggtcttcacagagtcagaagctttggaaaattatgctggcaagcagaaatgggcaaacatagcttatgtttgctacttggtctcacacttgtctaaaaacttgtgttgctggctgggtgcagtggctcatgcctgtaaacccagcactttgggaggccaaggcaggtggatcatgaggtcaggagactgagaccatcctggctaacacagtgaaaccccgtctctactaaaaatacaaaaaattagctgggtgtggtggcgcacacctgtagtcccagatacttgggaggctgagccaggagaatctcttgtacccgagaggcagaggttgcagtgagccaagattgtgccgcttctctccagcctgggtgaaagaatgagactccatctcaaaaaaaaaaaaaaaaattgtgttgtctattaaactatgtttgctttatttcagatggcctggatgctggaaattatgagaaaactaaatcctcccccagcctcctttgacaacaccactaccctctcctaccctcttcctcccattattctctattcgtttacctgctctcttcctctcagattcaacagaatttatacttttacatgtattggattgtttctttcttatcttccttctccacagctgtaaatgccataacagggaccacggccagattactcaccagtgtggccccagtgctgggtacaatgcttggcacacactacactctcaataaacatctgtcgtataaacaaatgaattctgtgattatgtatcatatgcacaagtcaacaacaacacaagttatgtattatgaaagggagaacttgcattttcacagaagaaaatgttgattcctcccttcttttctgaaacacttggcctcttaaataattaactaattttaattgatacatataaaattgtaggccaggcacaatggctcacgcctgtaatcccagcactttgggaggctgaggcgggtggatcacctgaagtcaggagttcgagaccagcctggtgaacatggtgaaaccctgtctttactaaaaatacaaaaattagctgggcatggtggtgggtgactgtgatcccagctactcgggaggctgaggcaggagaatcgcttgaacccaggacaaggaggttgccgtgagctgagatcataccactgcactccagcctgggcgacaagagcgaaactccgtctcaaaaaaaaaaaactactctctttgcaattttcaagaatacaatacattagttttcagtggttttgtttttttgagattgagtcttgctcttttgcctaggctagagggcagtggcacaatctcggcgcaatctcggctcagcaacctctgactccggagttcaagtgattctcctgcctcagcctcctgagtagctgggactacaggtgtgtgccaccatgctcagctaatttttgtatttttagtagagatggagtttcaccatgttggccaggctggtcgcgaactcctgacctcaagtgatctatctgcctcagcctcccaaagtgctgggattacaggcatgagccaccacgcctggcctaatacattgttattaaacacctatagtcattgtgtagtactacagttatcttaaatttatttctcctatcttggccaaccaaggtggctcaggcctgtaatcccagaacttcgggaggccaaggcaggaagatcacttgagctcaagagttcaagacaagcctaggcaacatggcaagaccctgtctccacaaaagtagaaaaagtagccaggtgcggtggtgtgtgcttgtagtcccagctactcaggaggctgaagtgggaggatcgcttgagcccaggaaagtcgaggctgcaatgagacaagatttccattgcactccagcccaggaaacagagtaagaccttgtctaaaaaaaaaaaaaaagcaaacaagcccacaagcagacaaaaaaaaaaaaaaaaaatcaaaaaacttattcctcctatctaactaaaagtgtgtatcctttgaccaacaactcctcaacccctctccctcctccaaactcttggctttgaggttggtgttttaaaatgaacagggatatttactaacaggcctctgccacaggtcacttctgcagggagtttatggctcagcaaaagagaaagctgtccctgtgagagcctcttctgctccagacacaactccaggtcagttaactaagtcctacttattccttagtttgaagcctggcactctgcctgtagtattttgcacagaagatacagacctttctaaagaaagaaggaaattcctccatcactcgttcccaaacatccctacttgccctctgttgagaacactagtcatagtttggatcaaattcaggaaaggaatgggagacagagacgctttctgaaaaagatttttttcattagggcaaacactgtctgttttccttttggtaccaggttttaaataaaccctagagtttatttaagttctcattcagggacagatctggcattctagcacagcttggccgactcactggtttccactcaggactccaaggcagggtggagcacaggacactggcacaatgccttcctgaattcagtctgtgtgtgtttgttgttgttgttgttgttgttgttgtttttgagacggagctttgctcttgttgcctaggctggatggagtgcaacggcgcgatcttggctcactgcaacctccgcctcccgggttcaagcaattctcctacctcagcctccagagtagctgggattgcaggcatgcgccaccacacttggctaattttgtatttttagtagaggcggggtttttcccatgttggtcaggctgatctcaaactcccgacctcaggtgatccacctgcctcagcctcccaaagtgttgggattacaggcatgagccacagcgccggccctgaattcagtctgtctactgctctgggtctcttccacctgatacctttcatctttcatactaacatctgttctagtacctacatgcatcaccttagtggaagctacagcagctgtcttcagcaatttatgggtacgcacataaaaaaatttccttagaagccaaggagtcccccttactatttctgtgccgtaaagtgggttatagtaacattccagaatatataacctgtgtgtgtacctaaaacttgattactccaataaatgaactcattttgtttcctggtgaacctcataaaagacaatccaccccttcccctgaacacactctgttcttctccccctctccctggggcattggattagggcctcagtgacaggcaagaatgacatcaccagttcaaaaactgctgctttattttctctttctttatacaaccaattaccattttcacataatttgctcaagtgtttatggcttttcttaattatttcataaggttccttccttcttaggacacccagttcatgtgtccattttcaggtcaagaaactgaagctcagggagtctcagcagggggaccagacatccaggctaccttaacaccgtctgggtttctgactgttgttctggcatgaggtttgcctaactctggatattaaaattacatggttgctctaggtctaagtgacaagaacccacctgagtggtagtgagcaagagtggcctcccaggtcactgttcttgttgttgcacctgtgttctgaatctttgtgtacccctaaaaattcatatgttgaaatcctaaccccctaagtggtatcaggaggtgggccctttagcaggtgattaggtcacgggggcagagccttcgtgaatgaaattagtgcattataaaagaggcccgagagggctgggtgcggaggctcatgcctgtaatcccagcactttgggaggctgaggcaggcggatcacctgaggtcaggagttcgagaccagcctggccaacatggtgaaaccccatctctactaaaaatacaaaatattagctgggtgggatggcaggcgcctgtaatcccagctactcgggaggctgaggcaggagaatcacttgaacctagggggtggaggttgcagtgagctgagattgcaccattgcacttcagcctgagcaacaagagtgaaactccatctgtctcaaaaaaaaaaaaaaaaaaaaaaggcccaagaaagaccccttaccctttgcaccaagggtgcaaaaagatggctattcctgaaccagtatttgaaccttcacaccagacactgaatttgccagcttcccagcctccactgtgagaaatacatttttgttgtttataagctacctagtttttgttattatagcagtcagatcagactaaggcacaccctaaagaaacaaacacagagagggacagagatctcacacagagacaaattcacatgggtctctgttcaagatcctgcctgagtccttctacaaaagtaaggaagcttctgtgaagcaaacatttccctttctcccactaatggacccattttgtatagcatgagtgttacactatggttttatctaaaacatggcactctgagaaaagcaagatgcagaagagtatacaatgtgctaccatttatgtttaaaaagagggaagatttatgtacatctattttttaaaatactaccagagggatatataagaaattggtaacaggctgggcatggtggctcacgcctgtaatcccaacactgggaggccaaagtggacaaattgctagagcccaggagttcaagactagtgtgggcaacacggcaaagcactgtctctagaaaaaatacaaaaaattagccaggtgtggtggtgcacacctctagtcccagctactcagagggctgaggtgggaggatcacctgttcccaggaggttgagactgcagtaagccatgattgtgccactgcattccagcctgggcaacagagtgagactatatctggaaaaaaaaaaaaaaaaaaggccaggcatggtggctcatacttgtaatcccagcactttgggaggccgaggccggcggattacctgaggtcaggagctcgagaccagcctggccaacatggtgaaaccccatctctactaaaaatacaaaattagccgggcatggtggcacatgcctgtaatcccagctactcggtaggctgaggcaggagaattgcttgaactcgggaggcggaggttgcagtgagcggagactgcgccattgcactccagcctgggcaacaagagcgaaactccatctaaaacaaaaaaattaagtgattgattctggagaaagaaattgggtaactcagtggcagggttgaaggaaatttttggtagcacacacctgtaatcccagctacttgggtggctgaggcacaagaattgcttgaacccaggaagcggaggttgcagtgagccaaaatcatgccactgcactccggcctaggtggcagaacaagactcttatctccaaaaaaaaaaaaagttcctttcagagtcggaagaacaaatagctgaacacagccacagccacagccacaggttatctcccctggatgtcagcttttgtatttctcctctgttatttcatcctggctgtctaggccttaaccatctttgttctagctaaagctgtgactggatctttgttttatcacctttcctggatgtgcaaatccagtatttctacccaggtctgtgaaacttcaaagcctgtgctcctgaacatattatgcttccatttgctctatcactaatgaaagatgagcttaagtcttccgttgattacagatttgtccgtttctcccttgagatctgtcaatgtctgctttatgtattttgaggctgttattagatgcatacaaatttagaactgttatatttttcatcattacacgtccctcttaatctctgattcttactttaacccttttcctgtttgccctgagaatactcgccagtgatgcttgcaactgcagcacttaccccaagaaggtgacaatgctgtcaacattccacagtgatactgtgattgaagtagacaacagaaatggaaagaaaactaagaagccagctgggcacagtggctcatgcctgtaatcccaacactttgggaggccaaggtgggcggatcacgaggtcaagaggtggagaccatcctggccaacatagtgaaaccccatctctactaaaaatacaaaaattagctggcatggtggtgcgagcctgtagttccagctactcgggaggctgaggcaggagattagtttgaacctgggaggtagaggttgcagtgagccaagatcgcaccaccgcactccagcctggtgacagagcgagactccatctcaaacaaaaacaaaaaacaaaaacaaaaaaatcagccaggcatggtggcacacacctgtaatcctggctactctggaggctgaggcaggaaaatcccttcaacccgggaggcagaggttgcagtgagctgagatcacaccactatatccagcctgggcaacaaagcaagagtccatctcagggggtggggcggtaggggcgggaaaaagccatgtgcctttgtggattataacaaaattatgggagcagtggactcagctgatcagatgttcatttcttatccaactgagtgcaaaagcacaaggtttggtataaattaatccaccaccttctaaacattacagtgcatgaactaaattagaaaattatctatttataaacggaaagtaaccacacaagcacaatggagtatacagtacgaattagtcatataaatacaagtggtagcgcaaccattctgagtcaatctattttattgaccaaaagattcctgtggaaacaggaggtgagtgccctaagccctcactccttagcactctgcgtgctgatgtagtcctggagaagcgcctgcgcctccatccgccggctcatcttggtggccttgccctgaaaacggcctttcttccctgctcctttgccttccaggacctcagccaccctggggaacagaggtatagtcagggagactttgagggaaaagtcacaaaaaaaaacaagggcagctctgagtctttttccagggactgggagagggataagaagagtagatgacttctaggaatctttcttgaaaacacttgcacataggctgggcatggtggctcacacctgtaatcccagcactttgggaggccaaagtgggtggatcacctgaggtcaggacttcaagaccagcctgaccaataggatgaaaccccgtctctactaaaaataaaaaaatcagccgggcatggtggtatgcgccataatcccagctactcaggaagctgagacaggagaattgcttgaacccgggaggcagaggttgcagtgagccgagatggtgccattgcactccagcctgggcaacaagagtgaaactttgtctcaaaaaaacacttgcacatatgcacaaagatatatgtaccatcatcacataagagtgaataactggaaacaacatcagtgtctatgaattgggctagataaattatgttaatctccagagagcagggtgagcacctgtaatcccagcactttgggagggcaaggcaggtggatcacttgaggtcaggagttcgagaccagcctggccaacatggtgaaaccctatctgtactaaaaatacaaaaaattggacgggtatggttatgtgcacctgtaatcccagctacttgagtggctgaggcaggaaaattgcttaaacctgggaggtggtggctgcagtgagctgagtagcctgggctctccaggctgggcaacagactaagactccatctcaaaaaacaaaaacaaacacatttcataaaaacaaaaacaaaaacatacatgtgagatgtggagccaaaagaccttcaactgtcaaactggaaatgacagtagtaataattatctctgctcagcccacctcacatgcccatgatgtgaattaaatgagatcgcagatgtgatggtcctttgactcagtaaaggaatgtatttgtaggatacaggctctactacatgtgcaagagagtccacaaagaattacctgggccccagggtctccacagacgcaggtggccctgccagtaagaagagtccaccacctttctcatcgcccacagttaagaacaggagggtctcctaggaggtaagacaaggagataagctctgatactgaaggatgtagagtcaaccccccaaatcctgcactctcttcaatcttaagaatagattatttccccctaaaccaccaagtgacgctcctgatgaatgatgatacagcccctccacactggcccacgagggccaagaaactttttgagagcaactatgggaacttaggtgaaacattaagaaggcagcagaagactgctgatcctggctaagcagaaaatgcctttcatggtttcactcttgcaaacttttccccaccacacatcctttccctgccactgcctaaaccaccaggtttccctctgcctggccgcctctgccccttgtctgtctgatgacctctaagcagtcttcaagggcccctcccctgaaacctccctatccttcaggtaatgtgctcctccacctctagcattcatcactctatcattctgaattataaatgtcgacatacatatttgtctcccagactagaatatgagcttcttgagaatcagttctgtctatacagaagaattatgaaaagagagatacacaacgctttacccacagtaggcattccaaagaagggttctggagtaaatacaaaagagatagtggggcatggtggctcatgcttgcagtcccaactactcaggaggctgacgtgggaggactgcttgagcccaggagttcaagactgcagtgagccataatcacgccactgtactccagcctgggtgacagagcaagactctgtctctgaaaaaaacaaacaaacaaacaaacaaacaaaagacctggaaatctctaggctagagaccatcaggagtgggaagagtaagtaaagccagaggaagaggaaaatggacggggatggctttcaaaggggcttgcccactcctgtatttactttttttttttttttttggagacagtctgtgttgcccaggctggagtgcagtggcgcaatctcggctcactgcaacctcagcctccagggttcaagcaattctcctgcctcaacctcccaagtagctgggtctacaggcacctgccaccacacccagcaaatttttgtcttctgttttgagacagaatctcactctgtagcccatgctagagtgctgtggcacaatctcagctcactgcaacctctgcctaccaggctcaagagattctcatgcctcagcctcccgagtagctgggattacaggcgcatgccaccacgcctagctaattttttgtattttagtagagatagggttttaccatgttgcccagggtggtctcgaactcctgagctgaggcaatccacccgcctcagcctcccaaagtgctggaattacaggcgtgagccaccatgcctggcctgatttttctatttttagtagagatggggtttcaccatgttggctaggctggtctcctgatcttaagtgatccacccaccttggcctcccaaagtgctgggattacatgcgtgagccaccgcgaccagcccactgatatatttctaatattggatccccagcacacataaacctgaatggctttgaggagctagagctctgatgaaaggagctcagaagctaataaacatcacagccccagagagagcaataacatagatctagctcaacacctaaaacagagcttggcatatagctagtactaagaaaacagtattgaatgaatggctatttcctcctcctcatgtgttcatgtggagggactttggctaaactagcgcccctcacttatgtctccctaggtctctatccaggccggggtagagaatctcatgctcctcttacctctgacccaatctcattggcaatgatattcatgaactctgaatcaccctccttcctacaacaaaggacacagacatgagacccaggttggagtggtggctgtgaaactgcaggaagcctggcccctccttctgaggctggccttgctgcctatgtacacataaagtcccatatcccttagccaagagagagtactggctgaaagccagcaagctgcccttctcagcctctgcagtttgtaatcaacctccaggtttgtttccatctcccttaaataggattcaccaggataagcagaaatctgttagagagtaaaggaggtaggggacagtcctaaagaaagatacaggctggacacagtggctcacacctgtaatctcagcactttgggaggccaaggtgggcagattgcttgaggtcaggagttcaaaaccagcctggccaacatggggaaaccccagctctaccaaaaatacaaaagttagcctggtgtggtggcacatgcctgtgatcccccagctactcgggaggctgaagcacgagaaccgcttggacccaggaggcacaggttacactgagccgagatcatgccactgcactccagacacactaagactccatctcaaaaaaaacacaaaaaacaaaagatacagagttacagtaaatatgttaatatcaaacccaggaggcctggtatgtaacatatttctttttttttttatatttttgagatggggtctcactctgttggtccaggccggagtgctgtggcgtgatctccactcaccacaacctctgcctcccgggttcaagtgattctcctgcctcagcctcctgagtagctgggactacaggcgcgtactaccatgcctagctaatttttgtacttttagtagagaaggggtttcaccatgctggccaggctggtttcgaactcctgaccttgtgatccacccgcctcagcctcccaaagtgctgggattacaggcgtgagccaccgcgcccggccagtaacatatttcttaggatctactcaaccttgagaataccagtgagcaatccacctcccactgtacattgcatatagagaagacactgagccctaagcccaacacagttccccttccttgtgtccagctcctaatttctcacctgtgtaatatgaccacacctccccagtctggactgttcctgaggctatgggcaatgtgcacagccaggtctctgagcagattcaggttattctgaaatggatatggtaactcagtagataaatggaaaggataacaatagagagtatcagcttccctccacctcattctcccctcactcccactttgacaaactacacatctgtttaggcagaagaccaagtctgcagagcctatcctaggcagggcccatgccctctctaccctccatggaataaatcaccttctgcaggatcttggtggagttctggagctttttcactgcttccacatgatcctctgctccacacctgaaagagaaaggtcagaggagacctgcgcagcttcccagtcgtttctgatgttggggacataaatcaataatttccttcttgctatggtgcctccctgcagtcagggaccaggagatattctgaggaggtctcttaggcaactgggagaaaacatacaaaggaattaaccacttttcgtggttctgatttactatccaaagcacttgatcttttttttttttttttttttgagacagagtcttgctctatcgcccaggctggagtgcagtggaacgatcttggctcactgcaagctccacctcccgggttcacgccattctcctgcctcagcctctcgagtagctgggactacaggcgcccaccaccatgcctggctaagttctttttgtatttttagtagagacggggtttcacggtgttagccaggaaggtcttgatctcctgacctcgtgatccgcccacctcggcctcccaaagtgctgggattacagatgtgggccaccacgcctggccgcactttatcatttacgattgcatcttatctcccagaggtaagagattatgtcgaaaatctcagaaatgggaggtaatcgaaggtactgaaacaggcatacttaagcagagcagtcagtgctttttcagttccatgacttctctccatccacttcagcacccggttcccagacagaaatatcaggttggttctgttctttttccccttctcagtgcccagaatcttaatgacctacatgaggcaagggggtaacacacacacacacgtgtgcacatgcataaaccacagcggatcctagaacctgaaggcaggagaaacctatctgttcctcagctctgaaacagtgaaggggagatttcacttaggactcctcgattatccccctctcccactcccagccccatgtgatcccctctcccccaatccctcttctcagccactccacagccgttcctcacttacctgaaggtcactgagattgctcacatgggtcccacagcacatgttggaatcaacgccctcgatgttaacaacccgaatgggcccagcatgatcatcaggcaaaccccggccactcacctggactcaaggagaggggagggactgtctgaatctgatgaggaatcattccgcagaaaccatccctctggctctacccttacctgctccacctcaggatcatccaggctcagttctcggacattcacaggcagccgatctctgattttttcattgacgctctgctcaatggcagctacttgctctgcagtcatagagggggtgtccagctcaatcgcactccgaaatctccctaactccctgtcagaagtacagtggccacagataacatatcttactgaacaagaaaaagctgaaagcttttcctctaaaaactggaacaagcataccctctcaccactttttttttttttttttttttttttgagacggagtctcgctctgtcgcccaggctggagtgcagtggcgcgatctcggctcactgcaagctccgcctcccgggttcacgccattcacctgcctcagcctcccgagtagctgggactacaggcgcccgccaccacgcccggctaattttttgtatttttagtagagacggggtttcaccgtgttagccaggatggtctcgatctcctgacctcgtgatccgcccgcctcggcctcccaaagtgctgggattacaagcgtgagccactgcgcctggccttttttttttttttttttaagacaagctcgctgtcacccatgctgccatttggtggcaatcacagctcaccacagccttaatctccccggctcaagcaattctcccacctccgcctccctcccagtgctgggatgggcctgcctacagttagtcttatgcctcccactcaccatgatgttgtcttcagcttaaatagatggtcagcaactgccgtgatgagatgctgccctaagcaaagagagccagagacaggagaaaagtgagaagcctacatactcccacaatgataaaatatgagctacaatgataaaagcacagaaattctccttgttgaagacctgctaagcactgggtaatacactttagatactttattgaaaatcacaatgagaattctgcaagaggccttatgataccatttcacagatgaggaaactgaagcctagagagatcaaataacttgccatggcaatgtaacttataaggggctggacttgaacttaacttcctttttttttttttttttttttttttgagacagtctcattctgttgcccaggctggagtgcaggggctcactgcagcctccgcctcccaggatcaagcaattctcgtgcctcagcctcctgagttgctgggattatagacgtgcatcaccgtgcccggctaatttttctacttttagtagagatggggtttcaccacgttggccaagctggtcttgaactcttgacctcaagtgatccacctgccttggcctcccaaaatgctgggattacaggtgtgagccactgtgcccagtgaacttaagttccaatatgcagcattcatccattcaacaagtatttattgagtacctaccaaatgcaaggcacagggcttgacataagagatacagcagcatccctgattgacaagagtgatgatgaggagaaagaagaggaagaggaggaggaagaaaaggagaaagaggaggaactatcaaggaagagggaacaagacagccaaaggccttaaggaagaaagaagtagcgcatgtcaaaggaatccagagatgacaagcaaggccaggatgcagccagcaagaggtcaagggacaccagatgaggctacagcagtagacaagagccacccagatacagcttgtatgccatggtaaaaagtttggctttacacgaagacctacaggaagcctctgaagagctttaagcagaggagtgacataatattttcattttttaaaatttatttcagtcaggcgcggtggctcactcctgtaatcccagcactttgagaggccaaggcaagtggatcatgaggtcaagagtttgagaccagcctgaaacaacgtggtgaaacctcgtctctactaaaaatacaaaaattagccgggtgtggtggcatgcacctgtaatcccagctactcaggaggctgagttgcttgaatcccaggggtggaagttgcagtgagccaagattgcaccacggcactccagcctgggcaacaaagtgagactctgtctcaaaaaaaaataaaaataacaaataaaattaaataaaatttatttcattttacatatttatttttatttatttttgtatttatttatttatttattttgagatggagtatcgctctgtcacccaggctggagtgcagtggtgcaatctcagctcactgcaacctctgcctctcgggttcaagcgattctcctgcctcagcctcccaagtagctgggattacaggtgcacgccaccatgcctaatttttgtacttttagtagagtcagggtttcaccatgttgaccaggttggtctcaaactcctgacctcaggtgatctgcccacctcagcttcccaaagtgcctgggattacaggcatgagccaccacgctcagtctgtttttatttttcttgtttacatttccactttaacttatatttatttatgccaggtgcggtggctcaagcctgtaatcccagcactttgggaggccgaggcgagcagatcacaaggtcaggagttcaagaccagcctggccaacatggtgaacccccatctctactaaaaatacaaaaattagccggatgtggtggtgcgtgcccgtaatcccagctactcaggaggctgaggcaggagaatcacccgaacccagtaggcagaggttgcagtgagccaagactgcaccactgcactccagcctgggtgacagagcgagactttgtctcaaaaaaaaaaaaaaaaaaaaaaagttatatttacttttttgagacggagtcttgctctgttgcccaggctggcgtgcagtggtgccatctcagctcactgccacctctggctcctgggttcaagcaattctgcctcagcctcctgagtggctgggactacaggcatgcaccaccacgcccagctaatttttgtgtttttagtagagacagggtttcacaatgttggccaggctggtctcgaactcctggcctcaaatgcctgacctcatgatctgtccgacttggcctcccaaaatgctgggattacaggcgtgagccatcgcgagcagcctacatttattttctgagacagggtttcactatcttgctcaggctggtatggaattcctagcctcaagcgatcttcccgtgtcagcctcccagagtgctaggactacagcagtgagccacagtgcccagccatttctcttttctttttttttttttgagatggagtctcgctctgtcgccaggctggagtgcagtggcgcgatctcggctcactgcaacctccacctcccaggttaaagcgattctcctgtgtcagcctcctgagcagctaggactacaggcgcgcatcaccatgcctggctaatttttgtatttttagtagagacagggtttcatcatgttggccaggatggtctcgatctcttaacttcatgatctgcccacctcggtctcccaaagtgctgggattacaggcgtgagccaccgcacctggctgccatattttcatttttaagattgttcagctgggcgcagtggctcccgcctgtaatctcagcacattgagaagccgaggcgggcggatcacgaggtctggagttcgagaccagcctggccaacatggtgaaacaccgtctctactaaaaatacaaaaattagccaggcatggtggcacgcacctgttatcccagctactcgggaggccaaggcaagaggatcacttgagcccgggaggtgaggttgcagtgagccgagatcatgccattgcactccagcctgggcgacagagcgagactccaactcaaaaaaaaaaagactgttctggtgctatgtggagaatgggctacagaggagccagactgaatgtggggcaatcaattaggaaactgttagagaggtccagggggaagacagctaggagctgggactaggatgacagtgactgtggaaagaagtggacagacatttagaaaacaaaccaacatgctgggggggtgtggctcatgcctgtactttgcggggtcaaggcaggcggatcatctgaggtcaggagttcaagaccagcctgaccaatatggtgaaacaccgtctctattaaaaatacaaaattagctgggcatggtggtgggggcctataatcccagctactcgggaggctgaggcaggagaatcgcttgaacccgagaggcagaggttgcagtgagccgagatcgcaccattgcactccagcctgggtgacagagcgaaactctgtgtcaaaaaaaaaaaaaaaaaagaaaagaaaccaacaggactcagtgattggctggctgtctatgcctgaagaggtatctggaatgacttccagaacttgagtgactaggtgcatgctgatgccctgcgatgaacacacaggatgctaatgaaagaccaggagggaggggaaggctttttgtttcattttggacattttgagtttgaaaaggctgtgagacatccagatggagatatcgagtgggaagttgataatacctaaatccagcagttattctaatacttttttttacttcagttgttcatgttgctgttataacatttaggatatccttcctgaattacagctgattctgaatagtctgtcttttccaaaaggttaactcctagagaacccaaactacgtctcagtcatcacagcatccccatacatggcaactgctccggtgttatgtcccccatcccagcctttacctgaatgctgctgcatgtggtcaaacctccgctcccaatctacccggaccagaacctggcttcctggatccaggggtgtctgggtgaaatgatcagcctgttccccacggcgagtcactctcagcacagagatgtcattgattgtaccacggtcatcaggctggtggaaataagtaaacgtaatcaatggcaaggcagggctcaccctaacttctaggtacaaagaccctctagggtgagagacccagaatctgggctccctaagggagagggagaaagcaatgccaagtgaaatgagtccactttgttccatgagaggattctcagtccttttcattctaaacacctatgtgttgtgatcttcagaataacagaattaaagagattgtaactacagcaacaaaaattttagtaaaacccgaagaatcttaatcctcaactctccttgccttagtctagattcttttgtagtctctaaaatgatctgatttttcctccctccctccactccatcctcttgcagtggtattagaattagattcaaaaatgttcatttaggctgggcatggtagcttattcctgtaatcccaccactttgggagaccaaggcaggaggatcgcttgagatcagactggacaacacagtgagaccccacctctatgaaaaataaaaaattagctggccatgatactccctgctacttgggaggctgaggtgggagaatcacttgagcccaaaaggttgagactgcagtgtgctatgattgctccactacactccagcctgggtgacagagtgagacactgtctcatttaaaaaaaaaaaagggccaggtacagtggctcacacctgtaatcccagtactttggaaggccgaggtgggcggatcacaaggtcaggagatcaagaccatcctggccaacatggtgaaaccccgtctctactaaaatacaaaaaattaactgggcatggtggtgcacacctgtagtcctagctactcgggagactgaggcaggggaattgcttgaacctggcagacggagattgcagtaagccgagatcacgccgctgcgctccagcctggcaacagagcaagacaccatctcaaaaaaaaaaaaaaaaaaagttcattcattttaaaacatttcaagtgccaactgcttacaaaagactgtgccagcccaagaatacaatgtaaacaagatatggtacctcatggaacttaagagtctagagaacagaggctggaaaacagacaattgcaatatgacctataacatgccataatatgaaaaagtatatgacgctagagaacctcaaaggaaagagacctaacagtcttggggaatcaaaaaaagacttcctgaaagaaatgctgtctaaaatgagaccttctatggatacttgaggtcacaggttttccttcagcagatcagggaaatcttcatactgggaaaatcaccataataatgactgatatgaaattggaactctctcaataccaagtctactgaacatgttctctcatgtcacttatttgcttaagaacctgagtggaggccagggcagtggctcacacctgtaggcccagcctttgggaggccaaggtgggaggactgtttgaggccaggagctcaagatcagcctgggcaataaagtgagacctcatctctacaaaaaagcagccaagcatgttggttgtgcgcctgtagtccccactactggagaggctaaaacaggaggattgcttgagcctgggagttcgaggctgcagtgagctagatcaggccactgcactccagcctgggtgacatagcaagatcctgtctcttaaaaataaaaaagaaagaaaataacctgcatggttcgctgcccacacaccttaatacaccttttttttttcttttgagacggagtcttgttctgtcccccacgctgaagtgcagtggcacaatcttggctcactgcaacttcagcctcccggttcaagtgattctcatgcctcagcctcccgagtagctgggactacaggggcctgccagtatgcctggttaatttttatatttttagtagagacaaggtttcatcatgttggtcaggctacttgggaggctgagacaggagaatcacttgaacccaggaggcggaggttgcagagctgagatcatgccactgcacttcagcctgatgacagcgagagattctgtctcaaaaaaaaaaagaaagaaagaaagaaaagaaaagaaagaaaagcctttctcataatgcccacctttggtgttattatcctcctcttccatcttcacaatgtacctcacttgcgctcatgttgtacctagtcctcatcacagcactgataaatatgctctctgctgtactactgtaacccgtctatctcacctgaactccttcaggaacatctttttcagtccctaaaacccgaagctaattccttccttggggcctttgcacctgctattctacctgcctgaatactccctctgccccccagcaccactagataattgcaaagactcaccccctcacttcgtttaggtctctactgaaataacttacccttcatctagacaagcatcccatcactctctttccctttacttggtttttgtttattacttattatacctagcacacacagttgtcttcaataaacattccacgtatataaaggcactgtgttgttcaccggttatccttacagcctggaataatatctagcatatgttatgtctagataagcaattgctgataaatactcattaaatgaataacaaaatgaattaaactaaagctcatctgaattcattatggctgagaaaaaaggggcaggagagcatttcggcctgagcacaaagaaactgggggcttcctgggaagagatcgttttggtacctgtcccccgccctcagggaaaagcactgtgtcttccagcaccacttggaaaccgctcagcacttctttcttgccgttgctcccttcagtctgcagctccgcgggacagcaggagaccacggtggtggtgaactgaacagagaggaatgagagaataagccccgaccccagccctagccctagccctctccacaccaggacagaatgccatgttggcactccctacacgtggcgccctcttccccaaaccgccttgccggcccggcagtctcaagtgcctcgccgtgacgccgtacctctcgggcataactgtcacgctgacaccagaacgccatacctgcaggcgtgtgaggaggcgcacgcgcagagaagcctgggagcgaacggagagcgacgtgggacaaacgtcatcaagggcgcttgtctgcgcagaagcaggagggtaaggaatggaatgcggtttggataaatttactgaaaacgcgaattgcatatttgctgggttgtttaacgactgttctaaggctttacaaaggacaagaccaggaggaaaaaaacaaacaaacaaaaacaaaaaaacgcgacctggacaaggcacgtggtttagtgagccccttggggccccagggatgtaagtattctggctgcggaatcccagcgcatagaggcggggacgggactggcatggttactgagcagcactgcccagtagaaatagaaagcaaggagctgggggaggtggctcacgcctgtaatcccagcattttgggaggtcgaggcgggtggatcacctcaggccaggagttcgagaccagcctggccaacatagcgaaactccgtctctactaaaaatacaaaaattagccgggcgtggtggcgggcgcctgtaatcccagctacccgggaggctgaggcaggagaatcgctggaacccgggaggcggggttgcagtgagcagagattgcaccactgcactccagcctgggcgacagagcgagactccgtctcaattaaaaaaaaaaaaaaaaaaaaaaaaaaaggccgagcgcggtgactcacgcctgtaatcccagcactttgggaggccgaggcgggcggatcacgaggtcaggatatcgagaccatcctgactaacgcggtgaaatcccgtctctactaaaaatacaaaaaattagccgggcgtggtggcggacgcctgtagtcccagctactccggaggctgaggcaggagaatggcgtgaacctgggaggcggagcttgcagtgagccgagatcgcaccattgcactccagcctgggcgacagagcgagactccgtctcaaaaaaaaaaaaaaaaaaaaaaaagaagaacaatttggccagcgtggccaacatggtgaaaccctgtttctactaaaaacacaaaaacattagccaggcgtggtggcacacgcctatataatcccagctacacgggaggctgaggcaggagaatcactttaacccgagaggaggaggttgcagtgagccgaaatcgtaccactgcactccagcctgggtaacccagcgagactacgtctcaagaaaattacattacattacattaaaatagtttgggccagacacagtggctcacatctgtaatcccagcagtttgggaggccgaggtgcctggatcagctgaggccagaagttcgataccagcctggccaacatggcaaaaccctgtgtctactaaaaatacaaaaattagctcggtgtggtggcgggcacctacaggctgggattacatcccagcttctaaggaggctgaagcaggagaatcgcttgaacctggcaggcggaggttgccgtgaactgagatcgcgatactgcactccagcctggctgacaaagcgagacttcgtctcaaaaaaaaaaaaaaaaaaaaaaaaaaaaaaagcaaattaaaccaggtgctaatttttatcttgtcaaatatctgaaacgatttagagaatggaacactctcattgttcgtaggagtgagaattggtacaatttcatcaaagagcaacttggtaacagctatcaaaatgtttaaatgtattttatctactccttgacctagcaattctacttctagaaatgtaccctacagatatcctggcaaaaatatgtaaagatccacatttttaaatgttgattgcaatattgtttgcaaatggtaaaagactgccggacgcggtggctcatgcctgtaatcccggcactttgggaggccgaggcaggtggatcacctgaggtcaggagttctagaccagcctggccaacgtggtaaaaccccgtctctactaaaaatacaaaaattagctgggcctggtggcaggcgcctgtaatcccagctactaggggagccgaggcaagagaatcgcttgaacccgggatgcggaggttgcagtgagctgagaccacgccgtcgcattccagcctgggggacaagagcgagacttcgtctcaaaaaaaaagaatatggtaaaagactaacgacctacgtgtccctcaataaagaacctgtgaaattatgaaaaatacattcaatggaataccatatagccatgaaaaaaatgagttagatctatatgttctgacttgtaaagatctccaatatatattaaatgaaaaagggcacaatgcaagatgcggatggtatgattccagttgtgtacacacacagacacacacaacacatctgctaattaagttttaacatactgcatgtaagtaatatatactatatgtttatgttccatgttatatattgttttgtatgttatataattataccttagaactacatagtataaaataaattataggtattatagtatttataatgcagtatggggccagggatggtggctcaggcctgtaatcccagcactttgggaggccgaggaaggaggcttaaggccaggagtttgagagcagcctgggcaacaagcaaatctttacaaaaaaatagtttgtcctaaagacaaggtctttacatatatataaaatatatattatataatatataatataatatataaaatatatattatataatatataatataatatataaaatatatattatataatatataatataatatataaaatatatattatataatatataatataatatataaaatatatattatataatatataatataatatataaaatatatattatataatatataatataatatataaaatatatattatataatatataatataatatataaaatatatattatataatatataatataatatataatatataaatatatatgtatttatatatgtagatatataatatataaaatatatataatatgtatcatatataatttatatattatatattttaaatatataatttatatataatatataaaattaatatatataatatatattttatatataaaattaatatataatatatatatattttatagagcgagacggagtttcgctcttgttgccctggctggagtgcaatggtgtgatctcggctcacagcaacctccacctcctggattcaagccattctcctgcctcagcctctgaagcagctgggattacaggcatgagccaccacgcctgactaattttgtatttttagtggagacagggtttctccatgttggtcaggctggtctcgaactcctgacctcaggtgatccacccacctcagcctcccaaagtgttgggattacaagcataagccaccgcacctagcctacaaaaatattttttaacttagtcagctgtagtgtagtcctagctacccaggaggctgaggcaggaggattacttgagcccaggaagtcagggctccatgaataatgaatgtaccactgtattccagcctgggcaacaaagcaagactctatctcaaacataaataaataaataaagtttacttttaaagtaaatcctaatagtttaccatgagttcaagagcaaagtctataggcaatgcatttattttgtttaagttacagtcaactgtacatattaggcactcaaaaaagtttatggacaaatagaatagctgttggacaaataaacatagacattaactagagtaacaatcagttttaaaagtataaagagggccgggtgtggtggctcatacatgtaatcctagcactttgggaggctgaggtgggtggattacttgaggtcaggagttcgagaccagcctggccaacatggtgaaaccccatctctgctaaaaatacaaaaattagctgggcctggtggtgcacatctgtagtcccatctacttgggaggctgaggcaggagaattgcttgaacccagaaggtggaggttgcagtgaacagagactgcaccactgcactccagcctgggcgacagagcaagactccatctcggaaaaaaaaaaaaaaagtataaagagatttctagagtgtgcaggaagctgaagtggctggttctagagatgacagaattagctgtaagaaatcagagcacaaatctgggcaagaggaagcaccccagcttggttactagagggagaagaggcttgccaccaggaggaataagtacaagaaggaaacagacagagaacagttcctagagatttattataatctgtttcttctttggctttttgctttgccccatatgcacacatagtagagatttctataatctgcattcttctttggcttttgttttgccacatacacacacatactcaaataatcaagtggcctaaacacagagattagaaaccaatcagtaagaaatcagaagccctaccagtctacccctccccgaccctgcatctgatgtggagccatagtcaagtgcctaggaggaagacaagcttgaaggacgacccttaataaagagcttctaggaaagttcagagatctcagaagaacttggtgcacagccaaagcgctgacaaaggcctaggcgctagctttctagaacaactggaaaatagccacagctgccttcccagctttgcgtcacagaaagttaattacttgttgcatcatcagcactgtcagaatcatcctgggggcgggggggaaaaaagacaaagcacctgtagaccctgcaaagcaggaacatttgtgttaacaaatactgcttcctctctcctgttctccaagtttctttttgtgatttcctaaaccacccaacttagggggctaatatgaaaggttttaacttactttggatgttaagtaaaccaacactactttgtcatacatcattagtttcaggactttttttttttttttttttttttttgagacagggtcttgcttcatcacccagctgcagtgcagtggcatgatctcagctcagtgcaacctctgcctcacagtctcaagcgatcctcccacctcagccacttgagtagctgggattataggctactgtgcctggctaatttttgtacttttggtagagacagggttttgccctgttgcccaggctggtctcaaactgctgagcacaagtgatccacctgccttggcctctcaaagtgctgggattacaggcgtgagccaccacacccaccctagtttcagaattttaattaatgctattgctccttacagctggggtaggtcttctctaggatggagaaacagaggggtagatggaaagcaggagggtcttgctagggttttctaaagcctggagaagaatattagccttcttgggccaggcgtggtggctcacgcctgtaatcccaatactttgggaggccgaggcgggtggatcacctcaggccaggagttcgagaccagcctggctaacatggcaaaaccctgtctctactaaaaatacaaaaattagctgggcgtggtggcaggcacctatattcccagctactcaggagtctgaggcaggagaatctcttgaacccaggaggcagaggttgcagtgagccaagatcgggccactgcactccaacctgggcgaaagagtgaaactcctcccccaccccccaaaaaaagaatattagccctcttgggtcaaactcaaatttggttaacaggcactgagaactactgtgtgctaggaactgggataggagctctctagtgggttgtttttaagggctacaaagaaactgaagggttgaggggaaggctttacttacatccaaatcatccatggcaggtggaggtctcttggtgctgaccttcttcaaaagctagtgggaagaaaaaataatcacaagggagaagggagtgaaggaagaacaatctgcacattgatggtccatagaagaatggttgcagccagaactggtcaggcaactgctcccatctttaaaacatcactggaattaatttgagaaaagtaaattgatccccttcttaaaagaaaatttaacacaaatccagattggagtcggctagtgtttttataactgaaaccaaataatataacgacagtgtgtgatttactgggggccaattatttatgatgtgagtttttatactgctagttttaacatcccatgaagttgtctggcttaacacgcgcacacacacacacacacacacacacacacacacacacacacagaggccgggtttggtggctcacatttgtaatgtgagcactttgggaggctgagacagacagatcacttgaggccaggagttccagaccagcctggccaacatgatgaaaccccatctctaccaaaaatacaaaaaaaaattagccaggggtggtggcgcatgcctgtaatcccagctactcaggtggctgaggcacaagaatcacttgaacctgggaagtggaggttgcagggagctactgcactccagcctgggagacagagcaagactctgtctcaaaaagaaaaccacacacacaggccaggcatggtgacttacgcctgtaatcccaccacttgggagggtgaggcaggtggatcacctgaggtcaggaatttgagaccagcctggccaacatggtgaaactccgtctctactaaaaaaatacaaaaattatccagaagtggtggtgggcacctgtaatcccagctactcaggaggatgagacaaaattgcttgaacccagaggcagaggttgcagtgagctgagatcgcgccattgcactccagcctaggcgacagaaaaccacacacacacacacacacacagaaaacagtagaacaagaattacagaaaagtggaaaaacgttttgtcaaacttcttcagaatacaggctctacactgaataagtgaatcaatgtatataatttcaataatattctttcctctcatccctattaaataaacattgcacaaaatacgtaaagaatatcagcatcaatgagtaacctgcctagagagcttgcatatctctgcttggccccagtgacaatcctccagagacatgtgtgcagagaaacacaaagaatgatcaagtgggcagaacacagtaggtgttgtctctcacctctgcataatgttccacatgagccagctccatctcttcatccccttcccagtctctccagttatcaaagtccacagacagccacactggctgcaagaagaggcaccaagagtcacaggccaggagggcaggagcaggagtgtgtgggagagtgtgggcatatgcatgggagcacgcctggggaaaagagggtcagtaggtccctagtcctcccaactgcactcctttgaccaggaacctgccaatctacacacaaagctaggcatgatagagtctgaaaatctcagaagtcctaccctccggccaggcgtggtggctcatgcctgtaatctcagcactttggaaggccgaggcaggaggatcacaaggtcaggagttcgagaccagcctggccaatatggtgaaacctcgtctctagtaaaaatacaaaaattatccgggcgtggtgacgggcacctgtagtcccagctactcgggaggctgaggcaggagaattgcttgagcctgggaggcggaggtcgcagtgagccaagatcgtgccactgcaccccagcctgggtgacagagcaagactgcatctcaaaaaaaaaaaaaaaaaaaaaaagaagtcccaccctccaggagccgattgactgaggagacaacacatctggaaagataattgtatcataaagcaacataggcattatgccctctctctctccctctccctctccccctccccctccccctccccatggtctccctctctttccacggtctccctctcatgcggagccgaagctggactgtactgctgccatctcggctcactgcaacctccctgcctgattctcctgcctcagcctgccgagtgcctgcgattgcaggcacgcaccgccacgcctgactggttttggtggagacggggtttcgctgtgttggctgggccggtctccagcccctaaccgcgagtgatccgccagcctcggcctcccgaggtgccgggattgcagacggagtctcgttcactcagtgctcaatggtgcccaggctggagtgcagtggcatgatctcggctcgctacaacctacacctcccagccgcctgccttggcctcccaaagtgctgagattgcagcctctgcccggccgccaccccgtctgggaagtgaggagtgtctctgcctggccgcccatcgtctgggatgtgaggagcccctctgcctggctgcccagtctggaaagtgaggagcgtctccgcccggccgccatcccatctaggaagtgaggagcgcctcttcccggccgccatcacatctaggaagtgatgagcgtctctgcccggccacccatcgtctgagatgtggggagcacctctgccccgctgccccatctgggatgtgaggagcgcctctgcccggccgcgaccccgtctgggaggtgaggagcgtctctgcccggccgccccgtctgagaagtgaggagaccctctgcctggcaaccaccccgtctgagaagtgaggagcctctccgcccggcagccaccccatctgggaagtgaggagcgtctctgcccagcagccaccccatccgggagggaggtgggggggggtcagccccccgcccggccagccgccccgtccgggagggaggtgggggggtcagccccccgcccggccagccgccccgtccgggaggtgaggggcgcctctgcccggcggcccctactgggaagtgaagagcccctccgcccggccagccgccccgtccgggagggaagtggggggggtcagccccctgcccggccagccgccccgtccgggaggtgaggggcgcctctgcccggccgcccctactgggaagtgaggagcccctctgcctggccaccaccccgtctgggaggtgtgcccaacagctcactgagaacgggccaggatgacaatggcggctttgtggaatagaaaggcggaaaaggtggggaaaagattgagaaatcggatggttgccgtgtctgtgtagaaagaagtagacatgggagacttttcattttgttctgcactaagaaaaattcttctgccttgggatcctgttgatctgtgaccttacccccaaccctgtgctctctgaaacatgtgctgtgtccactcagggttaaatgggttaagggcggtgcaagatgtgctttgttaaacagatgcttgaaggcagcatgctcgttaagagtcatcaccactccctaatctcaagtaatcagggacacaaacactgcggaaggccgcagggtcctctgcctaggaaaaccagagacctttgttcacttgtttatctgctgaccttccctccactattgtcccatgaccctgccaaatccccctctgtgagaaacacccaagaattatcaataaaaaaataaattaaaaaaaaataaaaataaaaataaaaaaaaataaagcaacataggagtcaaccaataagacagacaagctgcagccaggcgcagtggctcacacaacctgtaatcccagcactctgcggggccagggtgggtggatcacctgaggtcaggagttcgagaccagcctggccaacatggtaaaaccccatctctactaaaaatacaaaattagctgggcatggtggcacatgcttctagtcccagctacttgggaggctgaggcaggaaaattgcttgaacctggcaggtggaagctgcagtaagctgagatcgcgccactgcaccccagcctgggcaacaagagtggaactctgtctcgaaaaaaaaaaaaaaaaagacaagctgcattccatggagtcagagacagcccttcaaggtccatgttccaaagtttccacatttatacagggaagaagttattcactccttcattcaaaagatatttattggccaggtgcagtggctaacatctgtaatcccagcattttgggaggctgaggcaggtggatcacttgacgtcaggagtttgagaccagcctggccaacatggtgaaaccccatctctactaaaaatacagaaattagctgggaatgctggtgggcacttgtaatcccatctactcaggagactaacgcaggaggattactggaacccggaaggtggaggttgcagtgagtcgagatcacgccactgtactccaacctgggcgatggagtgagactctgtctcaaaaaaaaaaaaaaaaaaatttattgaacacatactatggacagactctcagcttggcactgggtttataaaaatgttctggccgggcgcagtggctatcacttataatcacagcactttgggaggccaaggcacatcaattgcttgagcccaggggttcgagaccagcctagggcaacatggcaaaaccccatctctacaaaaaatacaaaaattagccaggcatggtggcacacttctgttgttccacctactcaagaggctaaggtgagaggattgcttgagcccagaagggcaacgctgctgtgaaccttgattatgccactgtactccagcctgagtaacagtacgacatcctgtctcaaaaaaaaaaaaaaaaaaaaaggtcaacacactgtcccagccacttggaagcaagctggggagggagatataaataaagcactataatacagtgtgaaaagtgtggtggtggagttatataggggacatcatgggaaccccaaaaggagtcacaagaacccaggtttctggagtggcagggctttgaaggatgcacagggattgggtgggtgaaggtagtaatgatggtaacttttcaggaagaaggcataccttgagcaaaggtacagaggtgagaaacagcctggtttttgcaaaacaaacaaaacacaacagtctgctgtggctagaagataaagcttggggcagagagtgtgggatgtgctagtgtgttatgtaacggatctcaacctaaagggcaggaaatcaaacgctcaaatacccaagagagtcagggaggtaatgaaaaggagcaagtgaggtgaagtacatgatccactgaaaacttcaactctaggcatctggggatgtgtatcagtggggctagattctctcatttttctttttcttttttctttctgagacagagtctcactctgtcatccaggctagagtgcagtggggtgatctcggctgactgcaacctctgcctcccgggttcaagcaattctcctgcctcagcctccggagcagctgggattacaggcacgtgctaccgcgctctgctaactttcgtatttttagtagagacggggtttcaccacgtcggccaggctggtctcaaattccccaccttgtgatctgcctgcctcggccttccaaagtgctgggattacagtcacgagccaccgaacctggctccccgttttatttatttattttttttgaaatggagtctcactctattgcacaggcaggagtgcagtggtgagctcttggctcactgcaacctctgcctcccgggttcaagcaattctcccgcctcagcctcccgagtagctggcactacaggctcgcaccaccacgcccagctcattttttgtatttttagtagagatggggttttgccatgttggccaggctggtcttgaactcctgacctaaatcaatccatccacctcagcctcccaaagtgctgggattgtgagccacctctctcagcctcccatttttcaacagaagcttatagtctggatttttagaagatgcacatttttaaatgtcagcaactaataaaaattttttaatgtcagtaacaagtcaaaataatttctttttttttgagacgttgtctcgctctgtcgcccaggctggaatgcagtggcacgatctcagctcactgcaacctccacttcccaggttcaagcgattattctgcctcagcctcctgaatagctaggactacagacatgcgccaccacacccagctaattttttgtatttttagtagagacggcgtttcactatgttgtctgggctggtctccaactcctgacctcaagcaatctgcctgcctcggcctcctacagtgctgggattacaggcgtgagccaccacacccggccttaaaataatttttgacactgtaaagattaaaacaaatctgagagccagatccagccatcaggcagtcagttttcaacctttaaggaggagacgactttggagggccttaagtgggggagcatcagggtcaaatgtgtgttttagacagaccatgctgagggcaatgcagagaatggattgaaaatggaactgaaaatatgcaacaaacttctcactgtatgctggtgaggcttgaactaggaagaaattaagtagtgaattcattaatatttaagaggtcagtagagcctggttgtaagccactactagaaagaataagagtcatcagggctaggtgtggtggctcatgcctgtaattccagcaccctgggaggctgaggcaggcagatcacctgaggtctgaagttcgagaccagcctagtcaacatggcaaaaccccatctctactaaaaatacaaaaaattaccaggtgcggtggcttacacctgtaatcccagcactttgggaggccgaggcgagcagatcacctgaggtcaggagttcaagagcagccgggccaacatggtgaaaccctgtctctattaaaaatacaaaaattagctgggcatggtggtgggcacctgtaatcccagctactcaggaggctgaggaaggagaatcacttgaacccaggagacagaggttgcagtgagctgagatcacgccactgcactccagcctgggtgacagagtgagactctatctcaaaaaaaaaaaaatacaaaaatacaaaaattagccgggcgtggtggcacacgcctgtaatcccagctactcaggaggctgatgaaggagaatcgcttgaacccaggaggcggaggttgcagtgagccgagatggcgccattgcactccagcctgggcaacaagagagaaactctgtctcaaaaaaaaaaaaaagaaaagaagaaaaagaaagaaagagagagagggggagggaggaagggagggagagagagagagagaaagaaagaaaagaaagaaagaaagaaagaaaagaaagaataagactcatcaattaatttctacagtggaaactacttctgggactggaatatagaaaacaagaattggcagaggccgggtgcagtggctcacagctgtaatcccagcactttaggaggccgatgcaggtggatcacctgtggtcaggagtttgagaccagcctggccaacatgttgaaacactgtctctactaaaaatacaaaattagctgggtgtggtggcacatgcctgtaatcacagctactcgggagactgaggcaggagaatcgcttgaatctgggaggcggaggtgtagtgagctgcgatcatgccattgcactccagcctgggcaacaagagcgaaactccgaatcaaaaaaaaaaaaaaaaaaaaaaacagaaagaaaaaagaaaaagaaatggctgggcacattggctcacgcctgtaatcctagcagtttgggaggctgaggcgggtagaccacctgaggtcaggaattcaagaccagcctgaccaatatggtgaaaccccgtctctactaaaaatacaaaaattagccaggcgtgggggcacaagccagtaatcccagctactcaggaggctgaggaaggagaatcgcttgaacccgggaagtggatgttgcagtgggccaagatcgcgccactgcactccagcctgtgctacgggagtgagaatccatctcacacaaacacacacacaaaaagaatcaaaggttttgattgtgagttgcagtaaagggaaagaccatgttcatagcagtgccaatatctgaagtggagtcttacacatttcatcacctacaacgaaagtaagttaactgggagagattaccaagagagtaaaaagagactcaggacaaatagctaatgtatgcaggacttaaaacctgcatgacgggttgatagatgcagcaaaccaccatggcacacgtatacctatgtaacaaacctgcatgttctgcacatgtatcccagaactttaagttaaaaaataagccaggcgcggtggctcacgcctgtaatcccagcactttgggaggccgaggcgggcagatcacctgaagtcgggagttcgagaccagcctgagcaacaaggagaaaccccatctctactaaaaatacaaaattagctgggcgtggtggtgcatgcctgtaatcccagctacccaggaggctgaggcaggagaattgcttgaacccgggaggcggaggccatggtgagctgagatcacgccactgcactccagcctgggcaacaagagtgaaactccgtctcaaaataaataaataaataaaaataaaaagagagactaatacagttggaaaaaaaagattaggcaggacttgttgagtgattgaatattggctggaaaggaggcaaggacaatcccagctgtaacctgggtacatggagagaagaagcaggccactttccacacacccaccttgatatcctccttggtaagccgcggccaggccaccttttccttccattttctcacaaaacaagtaatagagcgggaagagcgcttatcctgggagtcctgccagatagagagcctcattcttagggtctggggtttagaattaatctccagtttccctgggcagcccggtttccatccaaaccttactgtcccatttcacccttaccttggagttcactttggcatagaactcaatctcattgtacaactccactccatcggcattcttgcagctgaggagacaatgaagctgaggagatgcggaatactccgtgtggggacattaggaaaggggtagattcctgggaagccaggccctcggacggcagggccactacctgaacacaatgcggtgatcctcaataagcacgtggacatcggtgctgtcctcaacacaaaactccatgaacacatacctgggcctgtcgtaccacaaggtccgggcgtgctgcctgaagagaagttgaggtgtggcttcataggggtgggagagggaagactgaggtcatttgggaagggactacccagggacctttgatgccacagttttttcaaagtggagctaaatgagacagaaggggtgaaagggaagggaatgacaggagtgggtgggtgtggtgaatgtgaacctgggaagaatagaacgtgcaagactaggaaactaggaggtcagggagaacattcaggtcacaccttccctcaccccacagttacagagaccaggggtccggggctcccgtggggcctcacagaacctggagcgcccagaagacttggagcagggaatctccagggaaaagggccagggggagcaccggagccggaaacactcaccgtgccattgcggctcccgctccagggtggcatttagagttccaggcaggggccgctatctttagatcctggggacgcccccagcagctgcctctccttatatggtcgggagagcagttgagaggaagagagaacatgacctggcagccaagggatctgcactctggagatactctgggacagcttcatccttgcagcccttcaccgtggggtcttcagaaatgcatagactatgaagagacaacccatctgctggaaccagggcaaaggctgccctagacgctacacacagggaatgacttttccccggtatcattcacctgtttctccgacgcttactgctcagtgtctgattcacaataggcgctcaataaaacattattgtcctgaattaaattcccggggaaggcgcgccctcggggacttgggtacttcaggccccgcccaccactcccctggggttccaggccaccgcgccgttgccatggcagcaggggggcgcggctgacgtgcggtggtgtttccgggaagatggcggctgtcgaagcggctgcagagccggtaacggtggtggcggctgttgggccaaaggcgaaagacgaagaggaggaggaagaggagccgctgccaccgtgcgaggcggtgcgctgggccccagtgggggcggtggcggaggcccggcctggggcaaccgcgtttttagaagaggcgacggccgaggagcctggcgcggccccgggctccccgccggattcgccgggccggacgctgcggcggctgcgggcagagcggcggcggctggactcggcgctgctggcgctgtcctcgcacttcgcgcaggtgcagttccgcctgcgccaggtggtgcgcggggcgccggcggagcagcagcgccttctgcgggagctcgaagacttcgccttccgcggctgccctcacgtcctaggttacgaagggcccggcgaccccgccagcgatgagggcgatgggctgccaggggaccggccatggttgcggggcgaggaccaggtgagtggctggagccgggccgcgaggaatatgggaatagtggggtcgtgtgggtggcgatccagacccggatgatggtgcatgcggggagaagcctccccgactcggtcggtgagtacgtgtgtcggagaccaggggactggagtgcggggccggctgaagggcaagaggacagaggcctgggaacctgagggtgagcggtgtgcacggaggatgtggagagatgtcggtgcgtgatgacgtgagtggtagaggagcggtgagcgaagtgagtcgttgagagggcagcagagcagccaagagcagtgctgcgcccactcacctttccctcacgtatctcagtcttgaacactttggctgctagaggaccccgactctggggattgggaaaattggcaaaggaaaggaaagtgagttggaatccgtggaaatttaggttaactccctgtccctgctttcctgaaatctaggcagtctttacacttctttgggtgggagtttggattaacagcagggtctcttagtaactgaaataaacacaactcttgattagataaatttcctaatgttggaatttttcctttttaagagacgggagggtcttggtatgttgcccaggctggtctcgaactcctggtctcaagccatcctcccgcctcagcctcaggactacaggcgtgtgccaccgtgcaggctataatgttgaaatttttaaactcttcctccatcctgcttaatcattaggcattctgaatgaggtcctctgataactgacaagatcgattcagtgtgcctaccccagaagtagtgaaactatgtataagacaccaggtaaacgtttccttacaagctttgcatctctggaagtgcacaaagtgctggctttattggaagtgttgaggtacactgccttttcactttttttttttgagacagagtctcactctgtcacctaggccagactgcattggcgcaatttctgcttactgcaacctctgcctcctgggctcaagcaatcctcctgcctcagcttccccagtatctgggactacaggtgtgtgccaccacacccagttaattttgtttattttttgttgaggcggggtttcaccacattgcccaggctggtctcgaactcctgagctcaagcgatctgccctcctcagcctaccaaagtgctgggattagagaagtgagccaccatgccccatcccttttcaccattttattcttcaaactacaatctacatgtggctttcttcccacttacattggttttagccaagaagatttatcaagcagataatgatttgtttattttagtctgaactgtttccagtgcaatcctgtgtttactgttccacccttctccacatacctgcaactccttacacaaggagcagccacctcaaactgtcagatttaagggctagaaaggggtggacagcaccaaaggttctacatgataggaaactctgttgttcattttcacctttagaaacagtaggccaaccccattttccatgatgtgattatgacacattgcatgcctgtagcaacatttcatgtaccccataaatatatacacatactatgtacccataaaaattaaaaactagcccagcgcagtggctcacgcctgtaatcctagcactttgggaggccaaggcgggcggatcacctgaggttgggagttcgagaccagcctgaccaacatgatgaaaccccgtctctactaaaaatacaaaaaaaaaaaaaaaaaactagccagacatggtggcacattcctgtaatcccagctactcgggaggctgaggcaggagaatcgcttgaacctgggaggcagaggttgcggtgagccaagatcgtgccatcgcaccccagcctggggcaacaagagtgaaactctgtctcaaaaaaaaacacacaaaaaattaaaaactgaaaaaaaaaaaaagactgtgtgcagtggctcatgactgtaatcccaacacttggggaggcgaaggctggaggaggatcacttgagcccaggagttggaggctgcagagagctatgatcataccgctgcactccagcctgagtaacagagcaagaccctgtctcaaaaaaaaaaggcaaaagaaacattgtaccaccttaaaaaaaaaaaaaaaaagtagtgctcaatccacctacaagttgtaatcttgtatttatacattgaatacattgacaggtgaacaggtaggaccagagtagggaatatcattgaactgaatgatttacttcttaccacttacctttttttttctttttccttttttttttttttttttttgagacagagtctcactctgttgccaggctagagtgcactggcatgatcaggactcactgcagccttgactcccaggctcagtagatcctcctacctcagcctctcgagtaactgggaccacaggcgagcatcaccatgctcagctagtttttgtatttgtagagatgaggtttcaccatattgcccaggctggtcttgaactcctgggctcaagcaagccacccaccttggccacccaaagtgctggattacaggcatgaaccactgtaccccgccaatttttttttttttcttgagacagagtctcactctgtcgcccaggctggaatgcagtggcaccatcttggctcacagcaacctccgcctcctgggttcaagcgattctcctgcctcagcttcccaagtagctgggactacaggtgcccgtcaccacgcctggctaatttttgtatttttagtagagatggggttttgccatgtcggccaggctggtctcgaactcctggcctcgaacgcctgacctcataatctgtccgactcggcctcccaaagtgctgggattataggtgtgagccaccgtgcccggccctaaatttttattttccactctgttgcccaggctggtgtgcagcagcatgatcacaactcactgcatcctcaacctcctgggctcaatccatcctcccagctcagcctcccaagtagctgggaccacaggcgcacactaccatgactagctaattaaaaaatatattttttctgtagaggtggggctctccctatgttgctcagctggtctctgactcctgggctcaagccaccctcccaccttagcctccctaagtgctgggattacaggcatgagccactgcacctggcccccagttttttttttttttttttgagacagagtctggccctgtcacccaggctggagtgcagtagcatgatctcagctcactgcaacctccacctcctaggttcaagctgttctgctgcctcagcctccctagtagctgggactgcaggcatgtgccactatccccggctaaattttgtattttgagtagagacagggttttgccatgttggccaggctggtctcgaactcctgacctcaagtgatccacccacctcaaccccaaatattttaaaccaatattttctcttatcttacttcatactggaaatgatttatgttatttcctgctttgcaccagagctcattgttctctcttgtttgcccacactccagcaaatagcatatcgtagctaccatggcaagtgacagagttcaacagacttggtcatgaaaatggaatcaaaatttatggctgatttctttcttccctgacataaagttgggtaacagtgagaacaaaaacaaaagacttttccacagttctttctccttaggctggttagacaactttctccactcagagttcattatttggaatttgtcattcttttctttttctttttctttctttctttttttttttttttttttttttggacacagagtcttgctgtgacacccaggctggagtgcaatgctgcggtcttggctcactccaacctccgcctcctgggttcaagccattctcctgcctcagcctcccaagtagctaggattacaggcacgtgccaccacactgggctagtttttgtagagacggggttccaccatgttggccaggctggtctcgaactcctgacctcaggtgatctgcctgctttggcctcccaaagtgctgggattacaggcatgagccactgcgttcggccatactttccttaattcagttcagtaacatacaacaaatgcatgttgagaacttatcttgtgccagacactgtgcctggcatttgtggttcaaagtcaaaacctttgtccttaaggagttcatagactagaagagacagaatcctaaacaaataatgtgatatgagctagactagaagtgtgaacaacctctagaggaaatgtttagttatgcctggggaaatcaggaagcctcttaaaggagaactaggccttcaccaaatggggaagtgggatagggttctaacagtatgcaactgcgctctgaaaggattacagagggactgccctgagaaaaggcttgctttcatgttgagcaaagttaaagcaagaggattgcattttaaatacttaaacaaaaagttaatttgttgttttcttttttttttttttttcatttcttctctctcattacttacttcttcagggcttggtaagtaccgttttaaggttaaatgtaatacgctgtagacttctagtttaagacgcagccttgcccctacaaatgatttgctggttttgctttttgtttttgagactcaagaaagacaaggaagaaccagtgtttgagaatacgttgacaagactttaccaccctgaagcatttttattagttgaaatgcagaaactactggtggccaacagttgaaaaaggagtcactagtcagcaaaacttacagatacttttttttaaaaacgttgttaccttcacatccccattatgtggcttttggttttttttcactggcctaggcacttgccttttactcttttgtttttggttttggttttttgagacagagtcttgccctattgcccaggctggagtgcagtggtgaaaacaaagctcaatgcagcctcaacctcctagactcaagccatcatcttgtcccagcctcttgtgtgactgggaccaccatgccaccacgcctggctaattttttttttctttgagacagggtcttgtgaagccttgacctcttgtgcttaagcaatcctcccgcctcggccactcaagtagctgggactacaggcatgcaccaccatgcccagctaatttttaaaaatttttttgtggagatgaagtctcactgtgttgcccagggtggtctcgaactcctgggctcaagtgattcttttgccttggcctcccagagtgctgcagttacaggcgtgagacaccactcctggtgcgtttgattcttttgatttttcagaagtggtctatcgtacatcaaagggactttggtgaaccttaggaaagctggttatgagtttttttctttttttttgagacggagtctcgctctgtcaccaaggctggagtgcagtggcgcgatctctgctcactgcaagctccgcctcccgggttcacgccatcctcctgcttcagcctcccaagtagctgggactacaggcgcccgccaccacacccggctaattttttttttgtatttttagtagagacggggttttactgtgttagccaggatggtcaatctcctgacctcgtgatccacccgcctcggcctcccaaagtgctgggattacaggcgtgagctaccgggcccggccagctggttatgagttttaaagcctctctccacacccttaccccagattcttttgcaaaatttggctgcacagagtaatcaggagttgtgttatggtaactggctgtggagaatggcatgtcttaattcctgggaggctatcttggctgagatagattgtctctaccctaactagacctttgggggaaaaaaggcagtcttaacaaaaagcctcattgtattaatatcctatttccaatgagggacagatagtttcttaaagaaaacacccatttgacaaattgcctaggatgaaataattattcttacttttgaatctatcgtatgaattgtgtatttcatttggattattggaaacatcttatattttattggtcattactggctcgagcagattcttaatgtgccctgagtttccctttgcctgcataatagacccaattattttcttgccttagagtgagcaggaaaagcaagagcgtctggaaacccaaagggagaagcagaaagaactgatactgcagctcaagacccagctagatgacctggaaacgtttgcctatcaagagggcagttatgactcgctgccacagtccgtggtgttggaaagacagcgggtgagcagaccccagaggaacctccaccactgcccgaggttaacttgtcccttccagcattcacagggcatcctctctcagctcagttctcctttggccttactgagaatccctctgctggcccaaatcaaagggaaattttactgctatgaggaacctttctttgctcacacatggaaaacacagattccaaagttttgtaatacgataattgagctatttctttttggtgattgtaattaataatagaaataagaatataacaataatttcttcatttgatcacttaaaaaattctacttgggcccatcatacaatgtaatctagcttttttgttttgttttattttgtttttgaggtggagttttgctcttgttgcccaggctggagtgcaatggcacaatctcagctcaacacagcctctgcctcctgggttcaagcaattctcctgcctcagcctcccaagtaactgggattataggcaggcgccaccatgctgggctaattttgtattttcaggagagatggggtttctccatgttggtcaggctggtctcgaactcccaacctcaggtgatctgcccaccttggcctcccaaagtgctgggattacaggcgtgagccaccgcacctggccgtaatctagctttttcctactactcactaccttttgataaacatgccaggaatccagactgactttaatactgtatttatttaggtaagacctgggtagacaggtaaatctcttggtagagatacagttacaacctcccctgcatgtttctctacccctgtgctgtggctgtttttctggctgggctggagtttacgatatcagattttttttttttttgagacaaagtctcagtttgtcacccaggctggagtgcagtggcatgatcttggctcactgcaacctccgcctccagggttcaagcaattctcctgcctcagcctcccgagtagttgagattacaggcatccaccaccatggccagctaatttttgtatttttagtacagatgggatttcaccatgttggccaggctggtcttgagctcctgacctcaaatgatccacccgccttggcctcccgaagtgctggggttacagatgtgagccaccgcacccagcctattatcagaattttaaattgttcctaataatgtcactaggatattttggctataatgcaccttgatattttatagagatttttctttagttgcctacagtagggcaagaagggataagaaggattagaaattaagaaaaatcaggccagttgcagtggctcgtgcctgtaatcccaattctttgggaggctgaggtgggaggatctcttgaggccagaagtttgaggccagcctgagcaacataacgagaccctgtctctacaaaaaatttaaaaattaactaggtggtagcgtgtgtctatagtcccagctatgggggagaccgaggcagaaggattgcttgagcacaggagtttgaggttacagtgagctacgctcacattactggaccctagcctgggtgactgagcaagaccctgtctcttaaaaatcagtatatattctccttgaagcctttagagcaactaaatataaggcttgttggatcatcagccactttggatttttcatactgttgttttcctgagtgaaatctgactagcctggtagaaatttactgtgagtgggaggatccatttttatcagagaactgagggttctttttactttaaaagtagagagtctatgtcctcaccttgatcaatcagcagttaagtcatttactttcacaaatttagaggtctgttttttatttccatttaaggacagaagacatttttagattctccttcctaaccctctccctaaaaattccaaagggtgtgctcattgcttgtgatcttggtaggtgatcatagatgagttaataaagaaactggacatgaatctgaatgaggacatcagttccctgtccactgaagagcttcgtcagcgtgtagatgcagcagtggctcagatcgtcaacccagcccgagtcaaagaacagttggttgagcaactgaaaactcagatccgagaccttgagatgtttatcaacttcatccaaggttagaggaggggatgggatgagaagggtggacaggtgtcataataattatacttattctaagtactagtaaaaaggttctaattctggttttttgttcttttttgggcggtggggacagtgtctctctctgttcccctggctggagtgcagtggcacaatcttggcttactgcaaccgccgcctcccagatggaagcaattcttccgcctcagcctcctgagtagctcggattacaggctcccaccaccccacccagctaatttttgtatttttagtagagatggtgtttcagcatgttggccaggctggtctcgtactcctgacctcaagtgatccgcctgcctcagcctcccaaagtaccaggactacaggcatgagccaccatgcccagccaaaaggtgccaattcttgatgtactatttaagaggcttgatggcttagtaggggaggcagcattggcagagtagaaagtgcatgggtttcaaaatcagatagttaaaatctccactctcatactcattggttttatgtccttgagcatgttactaactcttcagtctctcttgtcatccataaaatgatgattcatggttcattcacttagcaaatatttattgagccaactactgtatgccagtcctcattttacacaattaaataggacaagagtttgtgaaattcttgtttctaataggcaccattaagtattatttttcctttaaagatctgccataaagggctaaataagtgtctcttctataatttctgattccagatgaagtgggaagccccttgcagacaggtggtggacactgtgagtgcaaggccggtgggaagacaggaaatggctgcagcagaacaggcagcagcagaacgcctccaggaaacagcaaaagtaagtgcagtttccagaacaggcaaatctctagagacagaaagtagatgagtggttgcctagggcttgggtgtgttgaggagaagaggggaatgagaaatgctgatggtatggatttgcttttgggaaggatgaaatattctaaaattgattgcagtgacagttatacaattctgaatatactaaaaaccactgaattaaacaccttaaatgggtgaatcatatggtatgtgaattatatctcaatacagctattattaaccagaaaaaggaagtccagctacatcctgggtggctcttgccttcatgtgagacccagcatgtggctcagactgatctcagcctgtgatttgttgagtgtagctctgtgccatcatggcctctcactgatgagccactgtcttttctaagcagcaaaggcagaggatgtgaagaaagtccgggagacggggctgcacctgatgcggcgagcgctggccgtgctccagatctttgctgttagccagtttggttgtgccacaggccagatccctccaaccctgtggcagagggtccaggctgacagagactactctcccttgctgaagaggctggaggtgtcagtggacagagtgaagcagctagccttgaggcagcagccacatgaccatgtcatcacctctgccaacctccaggacctctctctgggaggcaaggatgagctgactatggctgtgcggaaggagctaacggtggctgtgagggacctgctggcccatggactgtatgcctcctccccagggatgagccttgttatggctcctattgcttgtttgctgccagccttctcctcggccccagaggccatgcacccgtgggagctctttgtaaagtactaccatgctaagaacggccgtgcttatgtggaatccccagcccggaagctctcccagtccttcgcccttcctgttacgggaggcactgttgtcacccccaaacagagcctactgacagccatccacatggtgctgacagagcatgacccttttaagcgcagtgcagactcagaattgaaggccttggtgtgcatggcactgaatgagcagcgtctggtgtcctgggtgaacctcatctgcaagtccgggtcactcatcgagcctcactaccagccctggagctacatggcacacacaggctttgagagtgccctcaacctgctcagtcgcctcagcagcctcaagtttagcctccctgtagatctggctgtgcgccagctcaaaaacatcaaagatgccttttgatgagagtgccctaaccccagacaagctccttgttcagtagggatagatgtgctagtcttctagcataggagcaaggaatcagaggtggggttaaaggcatttttcccagaccctgctcaggcagtcggccaaatgagtgcaaagtctgttttccccaccaacttagctctcggaaagatgtgctggagggaccctcttgttaagaaggttctgccaggccgggcgcggtggctcacacctgtaatcccagcactttgggaggccgaggcgggcggatcacaaggtcaggagttcgagaccatcctgtctaacacggtgaaaccccatctctactaaaaatacaaaaaaattagtcggacatggtggcaggcacctgtagtcccagctactcgggaggctgaggcaggagaatggcgtgaacccaggaggcggagcttgcagtgagccaagatcgcgccactgcactccagcctgggcgacagagtgagactccgtctcaaaaaaaaaaagaaggttgtacccacagtatacgtgtgggcacttgtgcttgagcctgtattaaaggaatcaggccaggcacagtggctcacgcctgtaatctcagcacattgggaggctgaggtgggcggatcacctgaggtcaggagttcaagaccagcctggccaacatggtgaaaccccatctctactaaaaatacaaaaattagctaggcggggtagtgcatgcctgtaatcccagctactcaggaggctgaggccggagaatcgcttgagcccgagaggtggagactgcagtaagccaagatcatgccattgcactccagcctgggcaacacagggagactccatctcaaaaaaaaaaaaaaaaaaaaaaagacattcaacttgaggctcctgttagttaagctatcttctttcacttgaagcaggtttgagaggcctaggccagaatttaaattccttttatgaatagatttccctttcttcctgaccccaaggtcagaggagactatatattccatggctgcctctaagactaggaataggaatatctgaaaacagcatttctaagggtggtaaccacaggtcgattttaatacgagtcctttttcttgtagaggtaagtaaaatcttcctgacaaggtagtcctcttttcatggcacagacaatgggctttctgtttatgaggggtgagaagtgatgtttgttactatgttctccagcaagtaaacattcctctgctcacctcccaacaagactaacagtctttttagaagtaaatatattcaagacaaacgagaaaatcctggctacccaagtcgagtatatacaggaatacaaatcggtaaccagcagctgttcctcaggttgtgactcactgagcaccacttgtcctggaggctggatgatggaggacatctggttataggtactgtagcagggataggtgccacaggaggataggaactacagcagatcgctgtttccagaacggggaggagtatctcattgtgaaacagactctagagtggttctatttggtcttcagtgttttagcctcgttagttcatatttggcatgcagcttgtggtgagtactgttctaggactggccaaaaatgggcaaaatgtatcactccaaacactactgattcagcattgttttcatgtcttaaaattgccacctgcactttgtttctgcactattatgtagtgcattttaacttaaattttttccagcaacatgttacttatttaagatacattactgatatttcattataattagttcaccttccctgtgaaacaagagaattgtaaaatgttgtggaaaatgatacatatgtggatgctaatgaaatcatagtattttgtgtagcttctctgaagaccttagagatctgcagctttggtttataagtgtttgggccttatcagcccatctgatccagatcaatatttttttgaaaactgcctgtatcctctgtcctctgttacggatcatctcagctttggtggtggtagtaggggttttttgcctgaaaaaattcactaaaaagtccccttggcatgaccatctcctcctgcccacgcctgtagtccctccccacaacagatgtcatcacacatgctgcttttggaatggagaccttttttttttgagatggagtctcgctctgttgtccaggctggagtgcaatggcgtgatctcagctcactgcaacctccgcctcctgggttcaagcgattctccttccttagccttctgagtagctgggagtaccggcgcctgccaccacgcctggctaatgtttgtatttttaatagagagggtttcaccacatttgtcaggctagtctcgaactcctgacctcaggtgatccacccacttcagcctcccaaagtgctgggattataggcgtgagccaccacacccagccaggattggcacttttaaatccacttgtctggatatcactttgggtggtaactggtatagccatatggcgtagcccagcgatcaccccagtattgcctttttcaaatcacaaaaacaaaacttgtattaaggctttgtgctagcattacaggaagcattttcatttgtctcattctaattaaattctcactacttacaaagtgggacagtattatccccactttacagctgaggaaactgaactgcagagaggttaaatattttgtcctggtttacatgatgatggaagacctgagatttggagtcaagttttctgaatccagagcccacagtctatcttttcacttcattgtatcatgttgtttctagattttggtttctctttctcctttatccaccaccctcattcctcccctcactttggggaggagaaggtattttctacacaactgccagaaatttcagctgccaaaggacaaggctgcagggagacaggccggcagccatgactttcatgtctaagttcttgaaacctaaatgtgtgtatcaactgagacaacccaacaattccatcagcatccctgcagtcagatatctgctaagctctgatatcatctgtcattactgagaacagagctctgtccttcacttagggtgagacaggacaagggaggagaggcaggccagtccacccagatccaaggatatgcaagaatggaagggtcaagagccacggatatgtatgcagtggaaatgtagggtgtgttgtacaagtatgatctgcaaagtattgttaaagccgtctaaggtgctctccaatcattcattcactattgatcacttagcaactgcctgcctagactagatgctaaagaaagagaaaagtaaacctaccccgtgccctcaacaaacacagtctagcaaaggagataccataccaattggagatttggagagactgttaaaatatagattgctgggtcccatccccagagttttttattgagttgttttggggtggggcctgagaatttggtttctaacaagttcctaggttatggtgatgctgctgctctgggaaccacactttgagatgagaaccactcatatccaaactaagattatgttctctaataaaggtaagtacagactggattgctgagagagcccagagaaaggagagattaattctgcctgggagaattctggaataaccttgaaggatggatagaatttgaataggattttgcctggttacttggagaggaagaaaaagacacaaggaacagcccagggggtatgtgaagggtgggggagtcagaaatttatgctgcaggaaaggtagtaaggaaggaaaggagtgaaagttcatactattgaataagccaacaatggagttcaagaaaagtgaagaacttttcaagaaaaagagttgtttaaagctgttgctcaaaataagatctatagatcatatggctccactccagaccagaatgactatctctgaggttggagatacttctttaataagcatcccgggggccaggcgcggtgcctcacacctgtaatcccagcactttgggaggcctaggcgggtggatcacaaggtcagcagatcaagaccatcctggctaacatggtaaaaccctgtctctactaaaaaatacaaaaaattagctgggcgtggtggcgggtgcctgtagtcccagctactcgggaggctgaggcaggagaatggcatgaacccgggaggcggagcttgcagtgagccgagatctcgccactgcactccagcctgggagcgagagggagactccgtctcaaaaaaaataacaagcatcccgctgggcatggtggctcacgcttgtaatcccagcactttgggaggccaaggtgggtggatcacctgaggtcaggagttcgagaccagcctggccaacatggtgaaaccccatctctactaaagatactaaattagccaggcgtggtggcatgcgcctgtagtcccagttactcgggaggctgaggcaggagaactgcttgagctcaggaggcggagattgcagtgagccaagatcatgccactgcactccagcctgggcaacaaagtgagactccatctcaaaaataaaagacataagacaaaattcagaggatttagttactgatttgatttggagggtaaggtggcttagtcctagctacttgggaagctgaaatgggaggatcgcttgaggctaggagtttgaagctacatcacacctgtcaatagccactgcattcaagcccggcaacatagcaagacctcatctctttaaaaaatgaaatatataagaaaaagacattttaaaaaccattggaggccaggcgtggtggctcatgcctgtaatcccagcactttgggagttcgaggcaagcggatcacttgaggctgggagttcgagaccagcctggccaacatggcgaaactccatctctacaaaaaatataaaaattagccgggtgtggtggcaggagcctatagtcccagctacttaggaggctgaggcaggagaatcgcttgaacccgggaggtggaggttgcagtgagctgagatcgcgccactgcactccagcctgggtgacaaaatgagactccgtctgaaaaaaaaaaaaattgtaatggggccgggcacggtgctgcgtcgcctgtaatcccaacactttgggaggctcaggtaggaggatcacttaatcccagaagtttttgagaccagcctgggcaatatagtgagtccccatctctaccaaaaaaaagttctttgattttgtttttgtttttttcttcaaattacacgggcatggtggcacatacctgaagtcctagctactcaggaggctgaggtggggggatcacgagcccaggaggttgaggctacagtgagccatgattgtgctacacaccattcagcctgggtgacagagcgagaccctgtctcaaaaaacaaaacaaaagccattgcaatgggatcctgagggatacagggaaaattgtatcactggagagcttcaggagagaactgatgaaatcctggttgttccacatcttgcccaagacaaatcctataggttcagataagcaaaaactgtgagatagtttatctttcccttaaactcggaaagcacataaggtaccatgtgaaaacactcttctggtgagtgatgggaaataattcagtttgagagccaactagacctagattcagacctagatttgaatcccatctatgccactgattaggattaacctcagacaagcaatttatcctctctgaattgcaatttcctcatgtctaaatgggaggagaatgcccaagatgcagagttgtgaggattaaacaggctgccggcttgtataaagtgctcacatcttgcctgggagagaatcgctgctcaggatggtgacatggtaaacagtatgggttcaggagttgaactgcttgaggctgagccccagctccactatttaaccactatagacttcgggcaaatctctctaagccagtttcctcgactctagaatggagataatagtatctatttcttagtgttatgatgaccaaatcagatgatgtgcataaatagattaacctgacctggcacagggtaagcagctgccattcttctcctctacctccctcatgcttattctagttggtaatgtcagtgacaccactagactttaactgttgggggtaaatatcctttttgtttgtttttttaaaaccaaatttagcagtggggggttgtataccaactttagtgaccctaacgttgataagttctgataacccactactatcggaccagccacccttactgatctttgtccctccctctttagctaacagtgcccccgacaggcaccaataaatgccctatttttttccctgtgtctcccaagagaaaaagtaaatttcagattgtgttccccctcctagcgccagagaaaggaactacaacaaagcctagctgctgagtccagagcgcacagcacagtcgccctcccagctcttccgtcggccgggaggagtctcctttgctcttgtctactgctggagctgctaataaagtttcattcgaatacttgagctgccgcgccctgcgtttccctcatgagcttcttccgcccgcaacacgagactcagcaccacacaatcagcgtggcaaagcctgaagggcgggacaggaagtgaggtcactcctcaccggggtgaaaggttagcggaagtgtccttctttcctttttgctggtagggccgggtggttgctgccggtaagtagaagcttgggttgaatctttcaatccgctgccatccgcggcttgggggtcgaaggtccgggcggcgccgggtgcattccttccctaggtctctggcggctacgtatccgatcctgtcctgcgagcagggccctcgggcggccttgaccaaggcgacagtgaacacagtctgaagttccggcccaagacctgggcttgctggcaggagtcagctctgggcatctttggctttacggatttttaagtggccctttctccttgctctctgcagaaatgggcaagttcatgaaacctgggaaggtggtgcttgtcctggctggacgctactccggacgcaaagctgtcatcgtgaaggtatcagcctcgcgggactctgcgtccttgcatgccgggaccaggctggctgcggcggggcgggcaggcttggaattcaaggcctgtttctggggcagtagccagtgagcacggtcagggtgaacgtgggagagtttttgagagaggaagaagcacagtaaaagcaaatgtgagctgaattgggctcccaacgcataaagccttctccaccagaggctttaaatatatagtaatagtggctgacattgcacgcttgctatgtgctcccactgcctttcaggtattgtcatgtgcagtccttgaagtaatcataggggattccttttcttttcttttcttttttttttttttgagacgggatctctgtccaggctaagtgcagtggcgtgatcactgcagcctcgacctcccgggctcaagcgagtctcccatctcagcctctcgagtggctgggactacaggtgcgtgccaccatccccagctatagggggttccttcctgttgctaaggtttggaggtgttctgttatttacctgaagtgctgcagctgggaatctgtaagaagaggaggaaattgcttttagaaaggtcacatagcccctcactgttttcctcttatccatgattttgtagcttcttgagagagttccctaggctctggccacatacaccactgcgttttgttgttgtggggacactggagtacccctggattcccctctcccatctcctgagactgatctctggagttaggctgtggtgtcttaaccttggctgtacacttcactagcagtggagcaagtgaatagataccaagtcctgtgagcagtgcttggcatatagcaagtacttcttaaatgttaactgttgctacttttaaatctcttacctctagtaagccgttccagatgcttcctgatggagataaacactgttctgtttctctttggtcatttctcatagctttctgtgatttttctctttataatggtggatcttggagacctgagggtggaaatattttttggacactgcactacctctaacacagggcctaaataggccctcagtgaataacaaatgtaattcttactcatttagaacattgatgatggcacctcagatcgcccctacagccatgctctggtggctggaattgaccgctacccccgcaaagtgacagctgccatgggcaagaagaagatcgccaagagatcaaagataaaatcttttgtgaaagtgtataactacaatcacctaatgcccacaaggtgagcatttcaagaactagaatttaaatttcttctccctgctctgttgaataatgagacagaccttgcagccattccaacaccaggaagggatatcatttccaaaatgttcatcttcaactcataaagtggctatggtttccagttttgcctttgatccatcttttaagtgttgggtaaagattgttttccatccacagtaaacacaggcatggggtctgatctgccctcttccactgttccaccctcaaggataaatacaataggtttcaaaaagtctgtgagtgcgtgaaagcaagtcttccccaattaattttactcacctgttgggccctttagtctggggacatacactgtcttagtacagtgttttgttttgttttgtttttttttgagacggagtcgcccaggttggagtgcagtggcgggatctcacaccattcttctgcctcagcctcccgagtagctgggagtacaggcacctgccaccacacctggctaatttttttttttttgtatttttagtagagacggggtttcaccatgttagccaggatggtctcgatctcctgacctcgtgatctgcccacctcagcctcccaaagtgctgggattacaggcgtgagccaccgtgcccggccagtacaagtgttttttaagaagtacaagaggccgggcacaatggctcacgcctgtaatcccatcactttgggaggccaaggcggatggatcacctgaggtcaggagtttgagactagcctgaccaacatggtgaaaccctgtctctactaaaaatacaaaattagctgggcatggtaatcctgtaatcccagctatttgggaggctgaggcagaagaatcgcttgaacccgggaggtggaggttgcagtgagccaagatcacaccattgtactccagcctgggcaaggagagcaaagctccgtctcaaagaggtgcaaggccgggcacagtggctcacgcctacaatcccagcactttgggaggccgaggcgagcggatcacagggtcaggagatcgagaccgcactggctaacacggtgaacctgggaggtggagattgcagggagccgagatcacaccactgcacctccagcaaaagaggtgcgagaattgagaaagtcctgaacaataattgccagaacccagcagcatgcaccttaaagtttgctgctggtattgcacatttactctgggttggctgacctaaaggggcagagagaggccggacaccatggctcacgcctgtaatcccagcactttgggaggccgaggcaggtggatcgcttgaggtcaggagttcgagaccaacctggccaacgtgatgaaatctcatctctactaaaaaaaattagctgggcatggtggctggcacatgtaatcccagctattccggaggctgaggtgggagaatcgcttgagtttgggaggtggaggctacagtgagctgagatggcaccactgcactccagcctgggtgacagagcgagactccatctcaaaaaataaaaataataataaaagggcagagagagctgtttcttgggtgctgggatgtggtggggttgaggcagctagtgtttgggctgtcatgagagtgactgcattggcagaacttgaacaataaggaaatgatttcaagtagaaagttagctaactgtcatgatgaaagtcaagaaggcctaatttggccgggcacagtggctcaggcttgtaatcccagcactttgggaggccgaggcaagcggatcacgagatcaggagatcgagaccatcctggctaacacagtgaaaccccgtctctactgaaagtacaaaaaattagccaggcatggtggcaggcgcctgtagtagtcccagctactcgcaaggctgaggcaggagaagggcgtgaacctaggaggcggaggttgcagtgagccgagattgcgccactgcactccagcctgggcaacagcgagactgtgtctcaaaaagtgggggagggcctcatttgatgattcttagctagaaaaataaagtagttgtgggaaattgagaatgaaacattgaattttacattttattggcttgaatccaataaatgttaaaagtgaattttcaggccggatgcggtgactcacgcctataatcccagcattttgggaggccaaggcgggcggatcacgaggtcaggagatcaagaccgtcctggctaacactgtgaaaccccgtctctactaaaaaaatacaaaaaattagccaggcctgatggcgggcacctgtagtcccagctactcgggaggctgaggcaggagaatggcgtgaacccgggaggcggaacttgcaatgagctgagatcacaccactgcagtccagcctggacgaaagattcagactccgtctcaaaaaaaaaaaagtgtgaattttcagataatgtcatcgggacatggcttttgatggttgcttctaaggagtcagaccctgattccctagtgtcccacaaggatttgggctgtataggggccccggcagtatgtgggctaatcctgcctctccacctttgtccccaggtactctgtggatatccccttggacaaaactgtcgtcaataaggatgtcttcagagatcctgctcttaaacgcaaggcccgacgggaggccaaggtcaagtttgaagagaggtaagtaggctttggtagtgaatggtggagtatggtttcactatttccattcctttcctcattggtgtcctctttttttcccttctagatacaagacaggcaagaacaagtggttcttccagaaactgcggttttagatgctttgttttgatcattaaaaattataaagaaaaaaagcctgtgtctgcatgctgtatgtattaccagactgtgaaaaggagaacattattgaataggaaacactgggtgggctgggcacggtggctcacgcctgtaatcccagtactttgggaggccaaggcgagcggatcaccaggtcaagagatggccaacatggtgaaaccttgtctctcctaaaaaatactaagaattatctgggcctggtggtgcacgcctgtagtcccagctactcgggaggttgaggcaggagaattgcttgaacccgggaggcggaagttgcagggagggctgagatagcaccactgcactgcagtctgacaacagcaagactccatctcaaaaaaaaaaaaaaaaaaagacgctgggtgatggatgaggggctgggaaaatgttaaatctgccttaatgagatttatgctgcctctgtccttagcctgataatccctgtgaagaattgtgtagcctccctggcttctacccattacatgccaggagaacctctgccacacacactctgcccctccttgtgacaaccaaaggcccctgagtggtggggatcaggtatttttgattgagaaccactaacctgaaattctcaaaccttagcacagatagaggtcacctggatggtttgttaaaccacggattgctgaaatcctgccctcagactgatccagtaggtctgagtttctagcaggttttcaggtgacactggtactggtgtaggtgagatggggaccaccctggagacctgctcctggtggtaacgacagatgcctttggtgaatccctgagcctagagcagctgtttaataggacaagggagtgctcctcaaatggcctggctggcagagacttgaaagaaagtgatcaaaggagctttggggcattgggttgtgccactactgtgtagtgcaggagagacatttggttcttaggatctggcattttatctctcaatggactgtaactagtcatgtttcatgaatgaaataggtgctccatctgaatggttctgtcgctagagggaactaagattcaaacaggccagtttgccaagtctgctaggtaccacacttgcacttgggaaccagagggggcggggtggcgggaaggggccaaaagtaggattggtgagtaactggaaaaaactttgggctaggttactaggaaactttttttttttttttttgagacagaggcttgctctgttgcccaggctggagtgcagtggcacgatctcggctcactgcaagctccgcctcccgggttcacgccattctcctgcctcagcctcccgagtagctgggactacaggcgcctgccaccatgcccggctaatatttttgtatttctagtagagacggggtttcaccgtgttagccaggatggtctggatctcctgaccttgtgatcgttctacctcagcctcccaaagtgctggaatacaggcgtgagccaccgcgcccagccacttttttttaagatggagttttgctctttcacccacccagtccggagcgaggtggcactatcggctcactgcaacttctgccccgccccggggttcaagcgattctcctgcctcagcctcccaagtagctaggactacaggagtgtgctaccacacccagctaatttttgtatttttagaagagatggggtttcactatgttggccaggatggtcttgaacttctgatctcatgatccacccaccttggcgtcccaaagtgctgggattacaggtgtgagccactgcacccagccaggaaactttttaattgaatcttcacacacttaagtattaaggcatctctattgagacagacttctattaagtagcttgcctactcagggtcacagaaatggggctgaatttaaaacttttgaggaaaaatacagcaaatttttttccactctacctcaaggcccaagtgtaaatactgttcctaccaggtttggatccatgctttgattcctagccctgtgaccttgggcaagtttctaatgctctgtgcctcaattttctcatctgtaaagtgaagaaaatagaaccaacttcatggcattgttttgaagagttaattcatgtaaggcacaagcgtgttgggcagacgatagctctccttgctggccactgttaacagttttgtgaacttttttcttttttttttttttgagccagagtctcgctctgtcacccagctggagtgcagtggcacgatctcggctcactgcaagctccgcctcccgggttcaagcgattcccccgtctcagcctcccgagtagctgggactacaggcgcatgccaccacgcccggctaatttttgtatttttagtagagacagggtttccccatgttggtcaggctggtctcaaactcctgacctcaagtgattcaccgcctcagcctcccaaagtgctgggattacaggcgtgagccactgcacccagccttttttttttttttttttttttttttaagagacaagattcactgtgttgcccaggctggcctcgaactcctgggctcaagcagtcctcctgcctcaacctgctggaactataggcacatgttaccagtgggcccagctgctgggattggcactttttttttttttttagtcagaatctcactctgttgcccaggctggagtgcagtggtgtgatccggcccggctaattttttgtattttagtagggacagggtttcaccatggtggccaggatggtctcgtgatccacccgcctggacctcccaaagtgctgggattacaaggcatgagccactgcgcctggcagttttgtgaacttgaactgtggactttatctgtcctgattgtgtttctcattcattcagcaattattattttttgagatggagtttcgctcttgtcactcaggctggagtgcaacagcgcgatcttggctcaatgcaacctctgcctcccaggttccagctattctcctgcctcggcctcccaagtagctgggattacaggaatacaccaccacacccggataatttttgtatttttttagtaaagacggggtttcaccacgttggccaggctggtgtctaacttgggatctcaggtgatctgcccacctgggcctcccaaagtgctgggattacaggtgtgagccaccgcacccggcagttttgtgaacttgaactatgggcgttatctgtcctgactgtgtttctcattcattcagcaattattgttttatttattttttgagatggagtttcactcttgtcacccaggctggagtgcaatggcaccatctcagctcaatgcaacctctgcctccgggttccagctattctcctgcctcggcctcccaagtagctgggattacaggaatgcacctccacgcccggctaatttttgtatttttttagtaaaggtggggtttcaccatgttggccaggctggtctctaactcctgacctcaggtgatctgcccgcctgggcctcccagaatgctgggattacaggtgtgagccgccgcacccagctcattcagcaattattttatcaatgttcaatgtgcccagcattattctaggctctagggaaataatccattgacaaagcagggtctaccaatgggcttgtcggagattgctgggaatggttgatgggggccagtttgcagttggggtgaggtggctttccttgaggcagcctggctgagtgaagtcgactttgctgaccaagaaggctcctcccaggggtggggaagcctcggcagggggcggcatgtgagcgccagaaggcagggatttcacggaaatgaaagtggaagcaaacagcctgcgagcagagcctcctgaggtgtatttcgggtcttgctggggctgagagagaccacagccctttggggggtacaaacaagagttcagttgctgtgaattctgccactgtgcccagctctgaagcctcagctcttgccaaacagacccgagacccatgtcagccccactggatgccgtaagtgaggaggagggagttgggaagtggggaaacaggagtaatcctcttggctaggaacctgcagatatctcagggcctggcagccaagcctcaccctgcccatctcagacctgctgaagggctggggagaaacacagggctggggttgcctctgcaagagttggttccctaacctattgcctcagacaggaggagctcattaaatcctgtgtgtgtacacttctctggagagagaatctgtagtttccatcagatactcagcgggttctgtgacccaaataacaattgttctaggccgggcgtggtgtctcacgcctgtcatcctagcactttgggaggccttggcaatacagtgaaaatccgtctctactaaaatacaaaaaattagctgtgtgtggtggtgtgcgcctgtaatcccagctacttgggaggctgagacaggagaatcacttgaacctgggaggcggaggttgcagtgagccgagattgcatcactgcactccagcctgggtgacacagcgagactctgtctaaaaaaaaaaaaaaaaaaattaaactaaaggaattaggctgggtgtgttggctcacacctgtaatcccagccagcactttgggaggctgaggcgtgtggatcacttgaggttaggagttcgagaccagcctggccaacatagcaaaaccccatctctactaaaaacacaaaaattagccaggcatggtggcacacacctgtaatcccagctactagggagactgaggcgggagaattgcttgaacctgggaggcagaggttgcagtgagccgagattgtaccactatgctccactctgggcaacagagggagactgtctctcacacacacacacacacaaaatttatatatatatatatatatatatatactataagaattatactttaagaatcacactaggtaatccatagattaacacggtaaaaacttatcccactgcttagcacctacagagcattcaatatgtgtttcttcttaatattattattgccaaccttttcagaaccccagttccccaaggacaatcccttttttttttttttttttgagacggagtctcactctgtctcctaggctggagtacagtggcatgatctcggctcactgcaacctctgcctcccgggttcaagcgattctcctgcctcagcctcccaagtaactgggagtacaggcacgttccaccatgcctggctaattttttgtatttttagtagaaatggagtttcaccgtgttagccgggatggtcttgatcttctgacctcgtgatctgcccccctcaagctcccaaagtgctgggattacaggtgtaagccaccatgcccggacttttctttccttttttttttttttttttttttgagatggagtttcactcttgttgcccaggctgaagtgcaatagcatgatcttggctcactgcaacctctgccttccagattcaagtgattctcttgcctcagcatcccaagtagctgggattataggcacacatgccaccacgcctggctcattttttttttttttttttttttttgagatggagtctcgctctgtcacccaggctggagtgcagtggcaggatctcggctcacagcaagctccgccccatgggttcatgccattctcttgcttcagcctcccaagtagctgggactacaggcacccgccaccacgcccagctagttttttgtatttttggtagagatggggttgcactgtgttaggcaggatggtctcgaactcctgacctcgtgatccgcctgcctcagcctcccaaagtgctgggattacaggcgtgagccaccgtgcccagcatggctaattttttgtagagacagggtttcagcatgttggccaggctggtctcgaactcctgacctcacatgatctgcctcccttagcctcccaaaatgctgagattacaggcttgagccacagcacccggctttatatacgttaaattgggccatctttttcaaataaaaatccagattttttgttttttggagacaagatctcactgttttttccaggctgcagtgcagtggctggatcatggctcactgcagccacctccacctctagggatcaatagatccttccatctcagcctcccgagtagctgggactacaggcatgtgccaccatgcctggctaatttttaaatattttgtagaggtagagttttgtcctgttgcccaggctggtctcagactcctgggctcaagcgatctgcctcccttggcctcccaaagtgctgggattacaggcatgtgccacaacaacctgcccagattttttatttctattaaaaatgggaagattagggggcctgggtccgtggctcctgcctgtaatcccagcactttgtgaggctgagttgggcagatcacttcaggtgggaagtttgagaccagcctggccaacatggtgaaaccccatctctactaaaaataaaaaattagagccgggcacggtggctcactcctgtaatcccagcactttgggaggccgaggtgggtggatcacgaggtcaagagattgagaccatcctggccaacatggtgaaaccccatctctactaaaaatacaaaaattagctgggcatggtggtgcgtgcctgtagtcccagctactcgggaggctgaggcaggagaatcgcttgaacccgggagtcagaggtcgcagtgagccgagatcctgccactgcattccagcctggcgacagagcgagactctgtctcaaaataaataaataaataaaaaataaaaaaaattagccaggagtggtggcaggtgcctgtaatcccagctacttgggaggctgaggcaggagaatctgttgaatccgggaggtggagtttgcagcgagccgatattgcgccactgcactccagcctaggcaacagagggagactccgtctcagaaaagaaaaaaaaatagagggctgggcgcggtgtctcacacctgtaatcccagcactttgggaggctaagacgggcagatcatgaagtcaggagatcgagaccatcctggctaacacggtgaaaccccgtctctactaaaaatacaaaaaaattagccaggcgtggtggcgggcacctgtagtcccagctaatcgggaggctgaggcaggagaatgaagtgaactgggaggcgaagcttgcagtgagcagagatcgcgccactgcactccagcctgggcgacagggtgagactccgtcccaaaaagaagaaaaaaaaaaaatagctggcatgatggcacacgcctgtactcaggaggctgagatgagaggattgattgattccaggaggtcgaggctgcagtgagccataatggagcaattgcactccagcctgggtggcattgagactttgtctcaaaaaacaaaacaaaacaaaaacatgggtagatttgctgtggggggaaactttgttatggctagaagcagtttactttagaaaggacatgctcttcccagtgcgtcagagtccccaccactctctgttatcctacatggctctattaactcattaatgtcatccaactggcccttaaaggcactgtgttagcactctctgagttacagaaatatgaataactaatgatctttttcactattcataaaccagcataatttggtcaagctctagtattcttctgctaaaaatagaacaaactcacactgaatttctttggtgtcctctgtaatgtgctcctttaccgtcattcattcacttcatttcttcattcaacacagttttaccggacacatattttgtgccggagatcttgctggacacaaggaatacagagatggtcagaacagagtcctatctttccaagagatctcatgcttctctgagctgaacttctttatcaggattcctaaccacagggtgaactctgctctattccacaaacaaaggtgcatttattggtatccctggtgtcacttccctgcctgtgatgtcagttctctctctggacccattccagatcacacccagcctaaaaggttacttggtgtacagtggaaagtgtgacagtccagggacaagctagaattgatgggtaaactacctccccactctgggcttcatttcttcactgtaaagcacaggttagtgggtgggctctggagtcagacagcctagggccaaatgactttgggcaagtcatttaacctctctgagctttaatttcctcatctataaaataaggattggccaggcattgtggcttacacctgtaatcctagcactttaggaggccgaggcgggcagatcatctgaggtcaggagtttgagaccaacctggccaacatggtgaaaacctgtttctactaaaaatacaaaaatgagccaggtgtggtggtgggtgcctgtaatcccagctacttgggaggctgaggcaggagaattacttgatcctgggaggtggaggctgcagtgagccaagatcgcgccactgcaccccagcctgggagacagagcaagactctgtctcaaaaataaataaataaataaaaattaaaaaaataaatcaataaaataaggatcacaggatatctatcttagataccctgttgttctaagaattgaatgaaataattcatcagacgggcttagcacagtgcctggcatatagtaagtacttagtaaacgttagttaagaatatgactgtatgacattttgcaactagtctcccctcctcttggaggtgtccctaattgggttaacccctttgggattgtccctcttccaaattccggctgcccttcacagtcagtcatgtgatcatgtactcttgagcactgtttggcaggcctgagggtcgtacccttatcttccactgcctgtgtcagtgccgagcactttctagcaggagcttaatcagtgtttgttgaactctagatctgtggtcacgaacaagtcatggacgctgcaaaggctcctgccctttcaagagcagctgagatgaggccagccaagccctgggtggagggggccaagaccagcccagggcagcacaaaggggttgggttgttcttgagcttagcatcaactctgcttttggagcgtccagaataggccccacttcccctgggcttgttgattctctggaagggcgggtagaagtcttgttgtttccttctgccccaacaggccctccacgcccttcaggaggagcaggccagactcaagatgaggctgtgggacctgcagcagctgagaaaggagctcggggactcccccaaagacaaggtaaggtgggagatctggtgttgtttggtaaaaacgagctggcgaggccgggtgcggtggctcacacctgtaaacccagcactttggtaggccaagggggcctgatcacctcaggtcaggagtttgagaccagcctggccaacacagtgaaatcccatctctactaaaaatacaaaaattaggccgggcgcagtggctcacgcctgtaatcccagcactttgggaggccgaggctggtggatcacctgaggtcagtttgagaccagcctggccaacagggtgaaaccccgtctctactaaaaatacaaaaattagctgggtttggtggcacatgcctgtaatcccagctacttgggaggctgagtccgaattgcttgaacctgggaagtggaggttgcagtgagccaagatcatgccactacactccagctgggtgacagagcaagactccctttaaaacaaagaaacacaaaaaagagctggggagttctcggttttattcctggctctgctacttccttgctgtgtgacctccattatgttacttgaacatctgtaaagtagagctacccacctcccaggacaaattaagatgttgtatgtaaattgccctgtatggaccagacctgcattcatccactcatttatccagcttttctttcagtaaatgtatttatctccggcactcagcatcaatggaatggaatcggagatgccttcctcctaggtgggagtgaggaacactcctactcccctcccctacttccaggtcccattttcagtgcccaagatccccctggtattccgaggacacacccagcaggacccggaagtgcctaagtctttagtttccaatttgcggatccactgccctctgcttgcgggctctgctctgatcacctttgatgaccccaaaggtaagctcatggggagcctcaggagggaggtggggagggttcccagtactgaccctgtttcccaccacccagtggctgagcaggtgctgcaacaaaaggagcacacgatcaacatggaggagtgccggctgcgggtgcaggtccagcccttggagctgcccatggtcaccaccatccaggtgatggtatgacagaatcctggggcatgcaaagcatgccatgcacctgggcatggggaagtggagctgtgtctgggaccaccccttgctgtctccccctagatgtccagccagttgagtggccggagggtgttggtcactggatttcctgccagcctcaggctgagtgaggaggagctgctggacaagctagagatcttctttggcaagactaggaacggaggtggcgatgtggacgttcgggagctactgccagggagtgtcatgctggggtttgctagggatggaggtgagggctatgcaggcctcctgcaggggagagggtatagggtgtgcaagattacggtgcagggagaggagagggcttgatgctaaaggcccacccctccttgctccccacagtggctcagcgtctgtgccaaatcggccagttcacagtgccactgggtgggcagcaagtccctctgagagtctctccgtatgtgaacggggagatccagaaggctgaggtaagcaggaggggtgaagaacaggggctgggctgggtaacctgtctgcctgccaggaacttgcccaatgaaggatcagaggccccaaaccccactgacctacctacccaccatcagcctctccaggcctcccgacctcatacccccatggggcactgcctgccctacccccagcccccagcccttctcccatgagcctttgccatctcctggctccttttccagatcaggtcgcagccagttccccgctcggtactggtgctcaacattcctgatatcttggatggcccggagctgcatgacgtcctggagatccacttccagaagcccacccgcgggggcggggaggtagaggccctgacagtcgtaccccaaggacagcagggcctagcagtcttcacctctgagtcaggctaggggcctccccttctcatcctccccacccccccgccaaggttctcacactggcctgggcttgggtgcccatataggaggtctgtatgttcaccaacagtgcggaggggtcacacattgcaaaacactgcccagaacagtaaaaagagcctgcatgccatgatgttcttcctcatttcactcatgaaaggaaacgtgatttgggcatggaaagaggcagggggcaggaagcagcccagatcttctgctggcagcactagccttccaggagctcaccttccctccactctcagaggcaacaagcaggacccagggtttggctttttattgacacaaacacacaaaggcagctgtggtaatggggtggtggggtacacaaaagcagaaatcgcacttcacacatttaggcctcatttagacaatgaggaggctgagcctgtccctccacctcccattgcaatggttggggcaataaccctccctaatcctagctcagtgagtagagggagtgacctccctacccaggaagtccccattttggttgcaatggcccaggtcctgaccatcccactctgtacttccctgctccatctccccacccatgtaaacagagttttgggctgagtttgataagctgcctctctgctttgagaaggcagtagggcctcccctaactgcaaggggaatgtgcttggatttttactttggtcccagtacaagaaacagacagcactgcctttcagagctctggctagtaaatgccacacatatctgcaaggctgaggaagcttccccgcctttctcctcaaccaccatagagacgggacatggcacagaccacgatgagggcacctgtttttgccctgcctccccaggaggcttggggctgccccacccaatggcacatacacagatttttggcagtgttgtgggactggggaggagagaaaccccagctccaccagaacaaggaaggcactggggagtacaggggaggagaaggaggtgggaaacaggatcctccctccccgccgccacacacacacaagcacaggttttcgttgctaaggcactgagaacaaatccagagaactcagtgaagggtgggggctctgtatccttcccagagttgtgacctaggggagtaggtctgattcccgccctgttggaagaggcagccttggttaagaatggcagaaaacctggagatggaagaagcccaattgtgcttaagaagttggggacagaggacgagattgggaactggtcaagcccagaggcgggcactggtcagcccaggctgaagggacactagggagagacaggtacatgctggactcacagagattggccccatatcctgagctgacgtttcaattctttggggaggtggcggggcagggacgggaggaaagatgaggcagaggtgaaagcacatggaacacaacaggggggactggctaaccttggcacaaaagcagcacagcaggcccggggaaagggtgggggcaggaagcagccggcctccctctgaccctccctgtcgccttggcagggcccagacatccaaatggtcacttcccaacctcttcagaggtcaggaagcggggaggggcaggggagagcggtcatcaccacagagaccttcgggggagggagggcagagcattatgacagaggctgaaatgcaagtctggtggccaacagaacgtagcttcccaacttctcccttcgctggtctctagggtctcacagccacttgccctagttctccttctctggccctggaaccaggaggaccttgcccacattcttcttctcctgcatctgtttcatggcatcagccacctggggaggaaggaaagatgcggctcccagtgctatccaaccctcatccaacaagagccagtgtgatgcaggcagccctcctcttccccaggaatctgccccttgggaccccagccttcatgagtcctacccaagccctccctgcaaagtcctcacattcaccttctcgaagggccagactgagtcaatgtggggcttgatgtggccctggttgtacagagccaggaggcgggccaccacaccactgaccagctccacctcaccatccaggtagcccaggtggaagccacacacagcccggttggcctgcagcagctgcagagctgtcacgctgaactgattccaccatgtccgggccagggccatcaggttccgtttggggcccgtcagcaggttggccattcctgaaggacaaggtgacatagcctgtgaacccccccaggcacatccctgtgtgtctgcatctgtgctctctgttccctgtgatccccttgcaattctccacaccagtgccagggagtgattggataattctcaaactgctggttaccaggcccaaaccaaccctggctgactttaaattgctctaggggctgggtgctatggctcacatccataatcccagcactctgggaagccaaggtggggggatcacttgaggtcaggagttcgagaccagcctgcccaaaatggtgaaaccttgtctctactaaaaaatacgaaaattagccaggtgttggccgggtatggtggctcacgcctataatcccagcactttgggaggccgaggtgggcggatcactggacgtcaggagttcgagaccagcgtgaccaacatggagaaaccccgtctctactgaaaatacaaaattagctgggcatggtggtacatgcctgtaatcccagctactcaggaagtctgaggcaggagaatcgcttgaacccgggaggcgggttctaggctcaagccatctgcctgccctggccttccaaagtgctgggattacaggcatgagccaccatgcctggcttattttgttgtatgaaatacttttttaaatgaaaatgcaccctgcctaagatgctcagggaggtaggacagaaagaaggcaggctggttgttcaagaataatccccaaacaagaatgtagaatttggccaggcgtggtggctcacgcctataatcccagcactttgggaggctgaggcggctggatcacctgagatcaggagttcaagaccagcctggccaacatggtgaaacaccgcctctactaaaaatacaaaaattagttgggcgtggtggcagacacctgtaattccagctactcgggagggtgaggcaggagaatcgcttgaacccaggaggcagaggttgcactgatcgagatcatgccattgcactccagcctgggcgacaagagcgaaactccatctcaaaaaaaaaaaaaaaaaaaaaagaatgtagaatttactatcactcatatgaaaagttgtgacagagaatgaaaagagctggtacccaagagtcagcaatctgaatgcagcatacaggaccattcctaaccctgatcgtctacagagcacctgagtccctaccccttcttcattcaaaagccctggcctctatatcccaccccttagaccctccctcctgccctcacatgctctctccatccctggcccactaactcaccataggtgacgactttgcccatgggtttcaggaggttgtagcccttggcagtatctgacccacccagagggtccatgacaatgtccactcctgtcatagagtaggggaacccaagaacaacattaggatccacagatctggagctcccctccctgtcctgtgcctccctaccccctcccatattatgccccccacctttaggggaaatcttcttgatctcatccacgtagtcagtcgtgtgatagtcgatgggatgtgtgaccccattctccttcagtgcctcgtgcttgctggccgaggccgttccgaacactgtcacattctccactgtacggcacagctgcacggcagccatacccacaccccctgcagcaagacacccataagcaggggatatggagttgccctggccaccaaccactccattctagcctcccagggactcagcctgtcaccttcattttgcctacgctcattttagggccgtgtctaatttccatgactgagaagtggtggggaaggtagctagagaggtgggggtgtggggtgagggcacgttgctaaggatagcacaccagactagacctggtgcctgaatgttaccacggcaactacacagcagaggcctctgggagccacaggccaaggcagcctggtgttgccatgacaacaacccagacaggctgcagggaaggggcctggaaggaaatctgggtggggtaaggggtgataaagtgaggggacctgtcacctgcagccatgtgtaccaagacgctgtggccaggctgtaggttgccgaagtcaaagaggaccatgtaggctgtaatgtaattgacgagcaaggcagcagcttcctcaaaggtcatggcctcaggaatcaggaaggtctggaccgagggcacagtcacctcttcctgccacatccctgaccggttcaacaccatcacccggtctcctgccttgaagaacagaagagtatcattcagtcactcattcattcacccacaggctatttactgatttccccctaggtacaaggctaccttcttccaaatgaagtagcaggagaagcagcaatagtcatggtaataataataataataacatcatcatcaacaacaataacaactcacctttactgagtgctgactgagggccgagcccgatttcaagtgctttatatataatgcttaattaacccttacatcagttctttgaggcagatactatccttatcatcttcttacagatcttacatgtcactattgtgtaagatccctgaatgcaagaagcttacagttagggcagcatgaagtattgtggaaaagatcaaactgctgtggttacaaaagcggtctcaactgtttactgactgtgtgacttcggatgcataaaaattacttaatctttttgagctccacttttccagctccagttttcttatctgtcaattagggcagtttttccaaatggaaaaaaaaaattttagcacaatgtctggcacataataagcacttaataatgttagctaacaataataataataataatataatagcagcaaggaagtcacacaaccaaaagaagacggcactgtgtggtcagggccataccaaagtgcaggcaaagttctctgagcgcttacagcagggtgtggtcacctcgggagaagtgtgtttgagccagcactgggagcccagaaaacatcttcactcagagatggtgcaggaggggcaacagacaagaagggctacagaggcctacgcagcagtaaaaggcttcccccccacccccacgagagcctctgtgcaggagggaaaggggacaaagataacagaacctttctctccagcttagcaagtggggtcaagggaagggcagggaaaaggagggagcgtcaggagaaaagacttctctgcgctctctgaagagcatgaagagggaggtgtgggtgctgttctgggacaatctgggtctgtcttgatccctgccaggaatgatgggaattctgtatattaacaagagttagggtccatggggaagggggatgggactgccacttacgccctttttcatgtcctcaagcccccacactccactgaatacgagaactgagggcatgctggggtctttccttccaagttctggcctgagatgaggtctggagaacaagaacggaagccctccacccagggactcaggactagcagatacagaacaacccaggagagctgcgaggagtgcattggtcatttagggtcatggccagtcccagatttgacccagaacaagtctcacttaccctggctcatgctaaccctcaggccatccaaatcagggccatgacccctccccaacccagacaccaggaaggaggaggagggagagagagggaagggccctccccgcagaatccaggctcttacatcagattcttgccctggacaggatatcctgtatttaccaggcggaaagtgtatggaggggaggtgaggtgggtggccttcagcagtaacatgaactacaactacctcccgaaaatattcctcttagacgcctgctcaagagtgggatcatttagaagtcagtttgagggtggggccagagctgaattcagaggaaagccttaaggagaagctgtttgcatacaggatgaatccaacaaacctggctccagaattgggctggcaggtctgcaagaggctgcatctgtggggcctctcattgaggggtctgatttaaaaaggaaactcctggccaagcgcagtggcttatgtctgtaaccccagcacttagggaggccgaggtgggcagatcacctgaggtcgggagttcgagaccagactgaccgacatggagaaacccatctctactaaaatacaaaattagccaggcatggtggcgcatgcctgtaatcccagctactcgagaggctgaggcaggagaatcgcttgaacccgggaggcagaggttgcggtgagccgagatcgcgccattgcactccagcctgggcaacaagagcgaaactccgtctaaaaaaaaaaaaaaaaaaaaagaaaaagaaaaaaaaaagaaacctctaaacaaatggcgtgctgaggcctcatcccaggtctctcaaaaagctgatcattttgagctctctggtgtccagggttgtggccaagattaatgataaatgagaaggagaaacaggcctgcagacttggccaaccagttcaaggcgccgcacctctccgttccagtccaaacccctggcactggggtttctgaagtgggggtcctctgcaggaggaaggcagaggtgggtccccccttccactccccgccccaggcattcccaagggcagccccgggtcgtggcccgaaggctgagggctgagtcacaggaggaggagatactgcagtcacgggagacacagagcccaagacaaagatcggatgacccaatcccgcctcccccaccccaaaatcagatcggcggtgtaaggctggtggcggtggggtagcaaaggctctctctcctccgtgatgggcgtgtctcgtctctttggccttgctttgggaggggccgcctcacacccccacagaccacggggctgcatgtgaccaggactctggcacggccgctgtgcccccgcccaaccccgacgacatagcccctcaagctccctcggggaaagggggcactaaccgtcactcatagtcacagaccacaattacccagagagtgtttggtgggtaggggtacaggtgtggttttaatggggggggggggggggggtggggacggtagtgtggttgtgcgcatgcgcatgggcaccttattgttttcccccccaccagcacagcttctgggcggcggccacaactaaaaatggttggggaaggggcgataatttcgtctcccctccccacataaatgccgctctccaggagcccccaaacacaagttccttggctacgctttccacgctcgtgcacccaggtccgcgccagtttctcccgccctgccacacccccggcgctcgcccactcgtgccccactgcccagtggcctgcgcagccctgccctgccctacgcaacccgctcaccttgcggtcgctgactccctcgcccactgcgatcacaacacccgcgccctccatgcccggagtgacaggcagaggcgggagacggtcgtacagcccctgcctagccatgaggtctgcgaagttgagcccgcaggcccgcagacgcagcgtcagctggccgggcccaggggccgggggcgctgccggccggctctgcagcttcaccttgtcgtagcctccaaagccggtgagcactaggcagcgcagcagtggcggcgaggcggcggcggcggcggccccttcggaggccgcgggatgctgggggtcgctcgctgcctcggttttcggaggcggcgaagaggcgtcttccccggtcgctgcctcggctacctctctctcgtcggacatggctgggactcccgacgagagcgcacagctggatggagagtgcacagctggggaaggcggaacgcgtcgggaagagccgcggctgcgggatccagcgggaggggcggggcgccgggcgaggcggggcctcgcgctcagccttaaagggccagggccatagtggcgcaagctgggagagcacgaaaaggggcaccaggaacgtctgtgctcttgggatcaagccgactgtgatttatttattcatagtaaaccttattcaaattaaaaactattttaagggataggcctggcgcggtggctcacgcctgtaatcccagcactttgggaggccgaggctggtggatcatttgaggtcaggagttcaagaccagcctggccaacatggtgaaacccccgtctttactaaaaataaaaaagttagccgggcggtagtggcgcgcgcctgtaatctcagctacttgggaggctgaggcagaggaatcgcttgagcctgggaggcggaggtgagccgagatcgcgccactacactccagtctgggcaacagagtgagaccctgttaaaaaaaaaaaaaaaaagggccgggcggcgtggctcacgcctgtaatcccaacactttgggaggccgaggcgggtgggtggatcacctgaggtcaggaattcgagaccagcctgaccagtatggtgaaaccccagctctactaaaactacaaaaattagccaggcatggtggcaggtgcctatagtcccagctactagggaggcggaggctggagaattgcttgaacccaggaggcggaggttgcagttagccaagatcatgccgctgcactccagcctgggctacagagggagactccatctcgaaaaaaaaaaaggccgggcgcggtgtctcacgcctgtaatcccagcactttgggaggccgaggcgggcagattacgaggtcaggagattcacctggctaacacggtgaaaccccgtctctactaaaaaatacaaaaaattagccaggcgtggtggcaggcgcctgtagtcccagctacctgggaggctgaggcaggagaatggcatgaacccaggaggcagagcttgcagtgagtcgagatcgcgccactgcactccagcctgggctacagagcgagactccgtctcaaaaaaaaaaaaaaaaagttaaggaacagtcccaaaacttgaacttacatcagatttggagttaactcatatcagatttggagtcagccacctgtggactggagtccaactacattgtgtctcaggctctgacatctaacccaggcagggatgagacttaattcactgtggtcttgcagtggcaaagtagaagcatggagaccaagcctttaaaactttctgactttggtgttaacgttctgttcctcattttcccttctgtaacatagtgatgatgctgcgtgctctagttatatttatatttttatttttttgatacagggtctcactctgtcacccaggctgagcgaggtggggcgatcacagctccctacagcctcaaactcccggcttcaagcaatcctcccacctcagcctcctgaatagctgggaccacaggcatgtgtcaccacgcccggctaactttatgttttactgctctttgcagagcagggctaccccataggcagcgtgcctagagtggccaaacctagctaagttttgatttttttttctagagagagggtctcgctaatgttgcccaggatggcctcaaactcctgcacgcaagcaagccttggcctcccaaagtgctgagtttacaggcgtgagccaccgcgcccagcttctagttatctttacagaattatttgcagcatatattattgactcgaattgcctcgatataaaaaagcactttttttttttcgaaactctattgcacaagctggagtgcagtgaggcaatctcggctcactgcaagctccgcctcccgggttcacgccattctcctgcctcagcctcctgagtagctgggattacaggcgcccaccgtgcgggtttcaccgtgttagccaggatgatagtctcgatctcctgacctcttgatccgcccgcctcggcctcccaaagtgctggtattacaggcgtgagccaccgcgcccggcctattgtcagactcttaatcaagcctgacttttgggtttagctctggctccagcagagcaactctggcggttggttctttctcttccttatctccttgtccccaagcatccaccagaggacgcagctcccccaaaactttccacccagtgcttggctggaggaactcagtccacgcttctctgctagtctaggccggcggttaagtcaatgtaaccggagacccggctgcccgttgccatggggacggaaagctatgatgtcaccaccgtccgggtgggtgtgctggggttcaccctcccatttccccaagaccccctgccaggacataggcggacgcgggagagaaaaccaaagaggctccctccttccccttagcatctctctcccgccgtgttcaggaagtggatggctgccccagctcttgtccgcactggtacacctgcgtgcacgcgtgggtacacagcaggcccgagcttcgcgcttgtgccgctcatattctacccctaagaacttcgcttgaactctgacctgcccttatatccgagaaagtcaaataagcccagttcggcctgtcccaaaccggcaggggcccctcagaccacaccggcgggctggaccccggctctgaggcctctgttcccagggctccgcccagatcttctgggccccgccccccggctgcgggggtgggaggaggggccgggggggcgcggccgcctggctgggggcggggcggagggggggccgcggacccggggcgggggctcggcgcgggcccgcgagatgccggtgttggcggcccgagcggctgcagttgcaggggcgggggaggcggcggcggggcccgggagaggggtggcgtgggggaccggcgcgtagccgggaccatggaggggcagagcggccgctgcaagatcgtggtggtgggagacgcagagtgcggcaagacggcgctgctgcaggtgttcgccaaggacgcctatcccggggtgagggacctgcgtcttgggagggggacgctaaggctgctggggggtgggtgacaggggccctggcgacggatgggaatgggtactcgggtaaccagggacaagagacagggggtcggaggacgcggggaggccttgagggctcaggaaggactgcagaggattggggtgggaggaattagggagcagggtgagatagatggggtttgggagaaccagagcatccgggagggagggcgaggggaatgtcggaggtcctgggcaatggagaggggaagaactagggggctgaagggaccagaagggaacaggaggaggtctgggagcttagcagagattctccgggggggggggggggggggcaggagctcccgggatctcccctttgcccaatcccagaccaacttgtgtccaggggctgggctggacggggtgtgggagtgaggagggcatttatctggggtgaggacttggagagatgatctcatctggatccatccgtgtctgcagagttatgtccccaccgtgtttgagaactacactgcgagctttgagatcgacaagcgccgcattgagctcaacatgtgggacacttcaggtagccaagtccctgggggtcaccctgacttccaaggcggcccactctgtcccctcccttggttagacccttaggttccaggtaagcccagcccatccatccaattccaacaggaagggaaaaatcaatattctgctaaaatccagggaaactgaggtagaacttgcagagcctgacagaaaccatgtcctgaaggagaaagcctaggatctgagcccctcagctgggtcctgcctacctgggaaagttgggaaggaatggcttttaatttggaacatgttccttcagagataagactgggtttagaaaagacatttagaggccaggcacggtggctcacgcctgtaatcctagcactttgggaggctggggtggggggatcacctgaggtcaggagtttgagaccagcctggccaacatggttgaaactccgtctctactaaaaatacaaaaattaatcgggcgtgtggcacgtgcctgtaatctcagctaccaggaggctgaggcaagagaatcgctggaacctgggaggcggaggctgcagtgagccgagatcatgccgctgcactccagcctgagcgatagagcgagactccatctcaaaaaataaaaaagcagaaaagacatttagaatgtcttgagtgaggggtggtcaggaggctgtttctctccattgaactagataaatctgaggtcaagtcccaggagaatgggagagtgctctccctgccactgctcttttcctcctcccaacataaggagggtttttatttttacaagagttcccttcagggctttagactgccaaagcccagaaagcacatgcaacattttatgagaatgtctatagattttatgagcttctcaaaggggtccaaacctcagtcaagaataaaaattattactttttaaaccactagggaagcagagagccgtttcccaccatgtgacctcccttctgcccgctcccccacttgggaaacccagactccatgatgggtattaatgatgggtattaatggttgctcttttccattctctgctcccagcatcccttgaccaggatctgtaaggtctcccattcccttccaggcctcccatccactcaggcccctcatgccctgtcttccttcaggttcctcttactatgataatgtccggcctctggcctatcctgattctgatgctgtgctcatctgcttcgacattagccgaccagaaacactggacagtgttctcaagaaggtgggagcctggggaaatagggcagctagactgagggggaccagaccaccatggtcctgacataacatgggccaggaggagggagtgatggctggggtatggccatcagctggttagcgagtgaagctctcatccctgccacccctgcctccagcccccatccctcccagccacccctttcctgaaagtcctcagagctggatacagcagctaggggaggtgggggagtgaagggagaagcactcacaggattccttctctgctcttccaactccttggcagtgggagtcccagatggaggggatgggatgggaagcctgatcctggagctcaggaaagccctgtggcctcctctccaggccccagtttccatgacaaaagccaggggtgaatggacagaagtcagctagggcagccccagttcccaggtgggggaggggagggtgggataaatttgttcccaggagagagtatgggaaaggcgagtgggaatgggaagtttccaggctggcagacccttcatagccactgagggagaagagtccacaggcccacgccagccctctcctccccgctgcttctctctcaccccatcctgctctcaaaccaagcctagcattctcacctccttcctcatgtgggagagtcctgagggatacatggtttctgcgtgcttgaggaagagagggcacactgctggcatggcacaaaggctcacgctgtgcctccctccacccctccacaattctcttttcttctcctacatagtggcaaggagagactcaagagttctgccccaatgccaaggttgtgctggttggctgtaaactggacatgcggactgacctggccacactgagggagctgtccaagcagaggcttatccctgttacacatgagcaggtgggacccttgacgtctgacctcatcccagcctagacctgtcacctctgccccttcagtctctgatttgaaaacaccttacctggctcatcctttgttctggtctgtgacctctgacctgatcccttgactgcccccagccttgacattcaaccccagcccacagcctccatgcccctttctaagctgcaggctaagacctataactttctcccatgcactccttccttttccagggcactgtgctggccaagcaggtgggggctgtgtcctatgttgagtgctcctcccggtcctctgagcgcagcgtcagggatgtcttccatgtggctacagtggcctcccttggccgtggccataggcagctgcgccgaactgactcacgccggggaatgcagcgatccgctcagctgtcaggacggccagaccgggggaatgagggcgagatacacaaggatcgagccaaaagctgcaacctcatgtgaggggctaggagagggcagagtgtgaagaggggtggtgagggacacaattgttcccctgcctgcgcccaggcttcctgacctcctgatcctggctgggaagttagggcaggcagagcgagcaattctgggcaggggagctggagggcagaagggtatcatcgtttctcatctcctcctccctcctcttctccagtggatgttgagggagctaacagggctggcatctggggcatgaactgggatggggcaggtgggcgttagggaagctggtatcaaatggtgaccttggtggagtctcctatgtgaagagtaccctccctctccacccccagtccccatatcctggttctggcccaaggaaaatgtccattctatgaccttctcttttcctctcctctcacttctgcagctattctcacacatctaacctctaggcaacatgcactaaattcaaaagcaaggagaagcccttgccccccatcagtccaccagccctagaacctcccttgcctcaacagtcacctaataaagcccacctccatggaaaacggctgtggctttagttttgttgctttttaaaaaaatcaatctaccaatctttagcagtaagagggaaagttagacctcagctggggaactttcctgtccatgtccacagatagagcagaggacaaagccataggttggatcagaagtgtccttttaggagtcagagttgggagaaggagacatcctgggactgttcatcctagttaatgaagtgggcaattctcaggccattagggggttttagagcagaccgacatataattagtcagcatttctcagcccagccaggcctgctgctagtgtgggaggggtcctgctcaccatctgtacccctggcttggagcctgctggtaccctgggggttgtggggataaggaggcatcaggccgggcgcgctggctcacgcctgtaatcccagcactttgggaggccgaggtgggcggatcacaagttcaggagatcgagaccatcctggctaacacggtgaaaccccatctctactaaaaatacaaaaaattagccaggcgcggtggcagtgcctgtagtcccagctgctcgggaggctgaggcaggagaatggtgtgaacccgggtgaacctgggaggcggagcttgcagtgagccgagattgcgccactgcattctagcctggatgacagagcaagactctgtctccaaaaaaaaaaaaaaaaaaaaaaaagaaggcatcaaaagcctccacatcacagaagctacccctgtacagcgtgaagtttcctaagaggtcagtagtttgattctggggtctccttagaggctcaggccagggacctttctctcctcccatgctgagtttcatgatggctttcaggggagcatcagctgttagagtcacccctaccctgtcccttaaaggaaagacggtggagaggacggctgagcgcctgttgtcaggaaagacagtactggtctgttttctcgggagtctggtttcagattgtcctgtattcccttcctggctctggtcccactggcctcttttcggtgacattctcccccaggaaccatccctggcccttccctcccccagccctagccagttctcccagacacactggaagagaacactgaccttacccaactatctgctgggatcccacccaaatttatagcccattcctccctcattcattcattcagcaagtatgtactgaacaccaactgtgtggcatacactggcttgggagattgcaaggaccagtctctaagcttttggaggccagcccagtgtggaagagaggtacctcaggtgtgagggtgccatggctgagggatatttgtacatgtatgggatgctatgggagctccttgcagcctgagaagccagtcctgtgagccaggtcctgagggttgaagaggagttttccgggcagggaaggggtaggaaaggcactctgggcagagggtacagcatgtgtaaacacgtggagatgagaatgagcatagcactgttggggctcccatggcagggagaatagaagacaaggctaggaaggtacactgaggctactgcagggtccacagaggaatcagaatttcattctgaggatgaatgaaatcatcctcagaggatgaagccaccaggaatttcaggcagagagtgaagtgatcagagttgttttttggatagatggttatctggatgtggtgttggagctgggagatttggctctgaggtgtgtcatttaaaataatagcttctcggcagtggctcacacctataatcccagccaagattcctcctttgggaggccaagctgggaggatcgcttgaggccaggagttagagactgcagtgagctatgatcatgccattgtcttccagcctgagtgtcagagtgagaccctgtctctaaaaaaaattaaaaaataaaaaataaaaaatagcttctcctttcccttatgccaggttccagtcttgagaggaaaggaatccctacccaccactccctggatcatcagatatccctatcccaacctctcctatgggactagttcatctcagccagtctcaaagattctaggataacttcaatggcatttgaaattatctaagtgtgcttggataaccaccccctcaaactgagacctggttagggactgactcaaagaccctgagtcctcggctaagggtacaggagagggcaggggctccaggcccagctaggtggatctccatctgtctctgaggactgaccctttccccacaaggacctgccataaaaatcgacttgcgatttttagctgagtggcttctcttttccactttggacttctcagtgtatagcaggttcaagcctgcaaccaccaaagtgcagagtgtggagtgtttgtgccccctctttcctccaacctccatatcctgccatgtgagctcagggaatgcaaatgcatttaaatatccatctaaagcaaacataattagaaaaatcaatcagctggaggaccccccaaagtttaatacattttcaataccaccaggaatggatttttggtccctttctgcaggtctgggttgccagacgttttatttctggggaggagggctctgggctgaggagctcagtgggtgggaggagggaatgggactgttgctgatcctcaaaggcctctgtaggatggagggaggggaccttactcccttccccaccccagatgcaggagtcacccagcttccttctctgcgctgtttccttcacaaattagacattggtttgggaaacaatgtagcctcgttaaacatttaatgaaataaacaaataatcacactgtgatggctgccagagtttctgtgttttttttttttttttttttttttttttgagacggagtttcactctgtcattcaggctggagtgcagtggcaccatctcggctcactgcaacctctgcctcctgggttcaagcgattctcctgcctcagtctcctgagtagctgggactacaggcgcgcgccaccatgcacagctaattttagtgttttttttttttttgagacggagtttcactcttattgcccaggctggagtgcactggcgcgatctcggctcacggcaacctcacctcctgggttcaagtgattctcctgcctcagcttcctgaagtagctgggattacagccatgtgccaccatgcccagctaattttgtatttttagtagagatggggtttctccatgttggtcaggctagtcttgaactcccgacctaacgtgatccacccacctcggcctcccaaagtgctgggattacaggcatgagccaccgtgcccagccatttttgtatttttagtagagacagggtttcaccatgttggccaggatggtctccatctcttgacctcatgatccgcctgcttcagtctcccaaagtgctgggattacaggcgtgagccaccatgcctgacctaatttttgtatttttagtagagatggggtttcaccatgttggccaggctggtctcgaactcctgacctcaggtgatccacccaccttggcctcccaaagtgttgggattacaggcaggagccaccgcgcccagactagtggttttttttttgagagtctcgctttcttgcccaggctggagtgcagtggcccaatcttggctcactgcaagctccacctcacaggttcacgccattctcctgcctcagccgccccagtaactgggaccacaggcacccgccaccacgcctggctaatttttttttttttttttttgagacggagtctcgctctgtcgcccaggctggagtgcagtggcgcaatctcggctcactgcaagctctgcctcctgggttcacgccattctcctgcctcagcctcccgagtagctgggactacaggcacctgccaccacgtccggctcattttttgtatttttagtagagacggggtttcaccgtgttagtcaggatggtcttgatctcctgacctcgtgatccgcctgtcttggcctcccaaagtgctgggattacaggcataagccaccgcgcccggcctaattttttgtattttttagtagagacgaggtttcaccgtgttagccaggatggtctcaatttcctgacctagtgatccacctgccttggcctcccaaagtgctgggattacaggcgtgagccacctcgcccagactagtgtttcttaacctaggcaatccgcctgcctaggagggaggagggggaaggacagggtggatgggaagagaggactcaatcaaactcctgaaacacttcagctgacaagggtcctccccttgtgactctggccctcccagggggtagtcgtgggaagagcttcaggttcagaggcagaagtcccagggcctgggttgagctctgctgcttcttccctggggaatctttggtgaggcccagcacctctctgaacctcagtttttgcacctagaaaagggggctgatcaccacatctacctcattgtgttgctcagctgatgtcaacttttattctttacaaccaagacaccaaggcttaagtgcttctaagctgggcctgagggagttgggaaaggcttcttggaggggtattttgtgctgggacttaaaggctggaggaagacagaagacagaaagcaggaggtggttatgtcttgttcccacccctatcttggggcctgaagagagctttagtgactcctccaaagattgaggtccctccctgccaaatccccctctgcgagaaacacccaagaatgatcaataaaaaaaaataaataaattgaaaaaaaaaaaaaaagattgaggtcccttggtctccatttttctgaactcctcttattacgttttctgcagtctctgggtgaggacttcatgttgccatagtgaccctctccctgcttcagatgcactcagacttgtcctgcaggctgaggaaggtgtggggggaggggtcatgtccctgagattcccagtggggcaggcactcttggcacagctctctcccccaactccacattctcttccccaggaaagggtttagcgttttgttctcagtttgttctacacaaggcagctcctctcctgcttccttccttccagccaggttcccagatctccctccatctctgtctggtcaatcccttacttgctgtcctcaaagctgtgagtgagggtcagagagaggggaggctccaggtcgggaggtgtgggatgattcctgagtagctacccgctagcagcggagagacaagagagccctgtacactagtgcccctcccgacaagaaaatgcctctgctgttgactcctaaataacagatgtctgtctgcatattaatgagactggacgaataattggtgagtttttcattcagtgtcagaatgaacccggaggccttatgttcatgcacacagacacccactcacccctgactctccccttcccccacagcacaatgaaacagacgccagcaggcttgacccataaaggggaggggcagacagggaaccaccaggagggctgttagggaggggtgttaacaggagggagacccccatggttggtctgggtttgtcaggtttctttcttgatcactgcctccccacctccctgggggcaaaagcttgcatttgtgagatttcgccacgctgcagaaggggctcagagaaggagggggctctggggggacgcagtcgctgcctagaggacagcaacaaaacagtggtctccttcagtgactttgtgcctcccttgcgcctgaaatcaatgagccccttaccctgagttagaccctgtgccagggtgtgagatggaagaacagaggttttggagtcaggtaactacaatttgctagctgggtgcccttgcacaagttacttaacctctctgagcctcaccctttttgtctctaagaacacctaccttgcaagattgaaaggatgaaatgagataaagtgcattatgtgtctgtcttagtgcctggtttataataggccccaacacatatttttctctccccacctatccccaaaacaaaccaagacacttgctaaattgctgcctcatgccagacccacctttgttagggcaggggttaattaaaagtctagtaattatcctagctgcctggaaaccaagaggaaaagatacagagaggaacagaaacagagaaaaagaaatagacccaggagacagaatgatggaaacgaaggccccgggaacaggagaccacagagatgggaataagggcacagagaaggtattatggggaaacgaagtgaaccctcaaatgacagtttagaatccaggcctggtgcagtggctcacacttgtaatcccagctattcaggaggctgaggtgggaggatcacttgaacccaggtgagaccagcctgggcaacatagggaaacactgtttctagaaaaaataaaagaaataaaaattagctaagcgtggtggcacatacttatagtcctagctactcaggaggctgaggtgggaggatcacttgaaccaggagtgtgaggctgtagtgagcagtgatcataccactgcactctagcctggatgacagagtggaaccctatctcaaaaaaacaaaacaaaacaaaaaccaaacaggcccagtgctgtggctcacacctgtaatcctagcactttgggaggccaaggctggaggatcacttgagcccaggagttcgagaaaaatgtgggcaacacagtgagaccttgtctctacaaaaaattagccaggtgtcgtggcccacagaaagttgaggtggggggatcacttgagcctgggaggtagaggttgcagtgagctgagattgtgccactgtactactccagcctgggtgacagagcgagaccttgtctcaaagaaaaaggatccagaggttagagtttaaaatgcttagttttgctatgttcttgctgtttgaccacagcaaggctcacctcctctcagcacctcagtctcttcttctataaagtgaagcggtgatttgctctctaaggtcccttctcattgtgtgagaacaagagtcccagtggcctgggagcacaggggaggggaggcggctgcccacccttcaacactattacccatcggtcacttgtgctctgtctcctctctcccttggtaaatggatctgctgcgccagcaaacaactgtccattgtgtcctgatgagggacgagcagggaaaaccaatcacttatgatgcaaatgagccgacggctgcagcctcctcacattcactgagtgcttctcttctgcccagagcccggcgccgccccagttgggcctttctccctagccccagttcccatctggtcctggaggaggagttgggaggcccagactggcctccccattgtcgttcatttcactccctgcaaggagtttcaaccctcaaatcctcagagcctggcccagctcctctccccaccccaaaggtggctcagttttattttttttaaaaatcgattgaaattcacataacatacaattagccattttaaaatgtacaattcaggggcatttagtgcattcacaatgttgtgcaaccaccacctctggactcaggttttatgccctctgcccattctttctttttttttttttttttgagacggagttttgctctgtcgcccaggctggagtgcagtggcaggatcttggctcactgcaagctccgcctcccgggttcatgccattctcctgcctcagcctaccaagtagctgggactacaggcacctgccaccacgcctggctaattttttgtatttttagtagagatggggtttcaccgtgttagccaggatggtctcgatctcctgacctcgtgatctgcccgcctcggcctcccaaagtgctgggattacaggcttgagccaccacgcccggcctgccctctgcccattctatgccccacagccttcagtgggactgggaagctgctgaggcctcagcagagctgaggactaatggaggctgatgaataggctgagaaaagcccagagctggcctgaggtgaagaggtgattcccacactttaggatgatgttagaaggtttgggctttggtgggagggggacatcactgccttagccagaacggacctgtggccacgttgtagaacttttttttttttttttgagatggagttttgctcttgttgcctgggctggagtgcaatggcatgatctcagctcgctgcaacctctggctccagggttcaagtgattctctggcctcagcctcctgagtagctgggattacaggtgcacaccaccacgcccagctaattttctatttttaatagagacggggtttcaccatgttgaccaggctggtcttgaacttctgatcttaggtgatcggccttccaaaagtgctgggattacaggcatgagccaccgtgcctggccccagaacattcttgcattcttgaatttccatgggaatttttttttccattttaatctctcaggcattagaaaccagaagtggctcctgtacagatcttggtttccatagctttcagagcttctgtgggcttggggatgatcccgtcggcaggcttctcactttagcagctgcagaaggccctgagacagccccacagtcctttgcctccaggaaagacctcccgccaccaggctctaggaacaatcctagactttctacctaatttgtactagcttattccagagtcgtatagcctaacagctgggaagagcctcctgagtttctcctgctaatatacactgtcatttggttttatatgactttcaagagaagatggcaaacatctgcttacctgtgtgtctgtgttaccttggattcaccctctcttccctcatctaggacgcgtgataatgctttaaacacacacacacacacacacacacacacacaaacacacacacacaccctctggaattaaccagtgccaactgctgcagcattgcagagaaaaacactctgtagtcacaaacttatcttccagtgcatatctccatttaactggagtccagttagttgactctctctcagacatagcccagacagcataatgagggcatttccatctgtggcctaatgaatatcgagactcctaggctagttatttccaggtctgccaccagctcactgagtgacctttgacaaggccctggacctgttttagcacctataaagtggggttagcaattttatcctagtgaagtgggagagataatggctgggctagtgctttgaacctgcaaagaaatcatcatgaacaccataattatttccccagttattgcagcagcagtctctctgtctgccttgaatgtccatcacggagaagacctcgctgatggataggggaaaatgttattctgtctgggtggacattggtctaattaattacaaaggggtagacttcatgataggcaaaagagaatcaaagaggccgggtgtggtggctcatgcttgtaatcccagcactttgggaggccaaggtgggtggatcacctgaggacaggagttcgagaccagcctggccaacgtggtgaaaccctgtctctactaaaaatacaaaaattagctgggtgtgatggcaggcgcctgtaatctcagctactcgggagggtgagacagggagaatcacttgaaccctggaggcggaggttgcagtgagctgagatcgcaccattgcactccagcctgggcaataagagtgaaactctgtctcacacacacacacacaaaaagagagaaaatccttaggtgtgggtttagaaggagtcattcttggacacttagatcccttatattgtttttggagtaaatcagggtcatagaaaaatgggcgaaaggcattgaagggaattagcattccagaacatggctagttttccaaaggtcttgagagtggaaccaatagttggataagcccttcaatgcactgagtccattcattcatcctttacttcattcatttaggaaaaacccactggatgcctaacaaagtatctgctagttacagagctgggttatatcaaagataaaataattatggtcataagggattataaggaccttctagtcaaatagagaggataacatatgcacacaagtaacttcaattgaataaagtctcacaaataaagcaaaacttctggagtattctaagtggggagagattctggcctagaaaacctggagaaggctctgtaggggtgagcgggaaggattggggcctgtagagatgacagatcaggacttgcctagtagaacatagagtatgagcaaaatttatgggttcctatatttggtggccagggtgcctgaaaaggagcagcaggtaaggttgtgtttgggcttgggatggaaggtctggggagattggatggggacaaagggtcagagatatgtatcctttcaggattctcttgccttttctcatctctctgaatcaggtgctccttcctccaattctagcagctggaggctctcacctgggcctgtgtaatctccagctttccttttcatctggctaaattttactcaaggcccaaggcccagctgagatgcctccaccagaagtctcccacaacaggcagagcctggccccaccacacggccccaaaagaacttttacaccagaattctgcaagttttctttggctttcttttcttgccttactcattggatagtaaccaatttgaaggtcagaaatggaggttttcaccctcttttccacagttacatacatatacacacacacagacacacgcatgcccatacagaataccacagaactgggcacaaagtgtcccctcaatcattaaccttattgttttgttttgttttttcttttgagacggagtctcactgtgtcacccaggttggagtgcagtggcgcgatcgtggctcaccgcaagctctgcctcccaggttcatgccattctcctgcctcagcctcctgagtagctgggactacaggtgcccgacaccacgcccggctaattttttgtatttttagtagagacagggtttcaccatgttagccaggatggtctcgatctcctgacctcgtgatttgcccgcctccgcctcccaaagtgctgggattacaggcatgagccactgcgcccggcccattaaccttattgttattcactgcctcccaggactggttcccagcataatgcactggaaagagcacagggcttcagcctcacacaaatctttgaatctgggctctgccccttccttttgttgtgtgaccttgggtaagttgcttgacctctcaaagcttcattttcctcatttgtatgtgaggaatagtgcatggcacttagtagtagtgtggcaaatgatagtcattaatgattattgttgttgctgctgagagccagcaagatcagatggtctacaggacccagggctgggtttttattttccttcccttttaatttagttgtcttcttctcccatctgcctgctctgtgtctttcctgtcacctgtctatgggtcggcctgcctctccctccagcctggctttctcttctctcctcagagagctcggctgttgctgactctcacagggtatgggctgtgccttgtgcaacatcagtcaataaagataaattacaaaatcatttgttttatttgttcttgttactttgagggctgtctgaaattgcctttcttttgaaagccatatttgcatatctctatgctggagtcaaaggctgcagctgtggtttcaatacaatttaaatattaataaaacctcctaaacctttagctgttttttaaaaaagcagtcttgcccttctgctcctagattgctaatataatttaatctttgtcctttgcattgtacagcagtccccccttatctgcggggcatatgttccaagaccacaagtagatgcctgaaccctcggatagtaccaaaccctatatatattatgtttttccctatacatacatacctatgataaaatttaatttataaattgggcacagtaagagattaacaacaataactaataataaaatagaacaagtcaaacaatacttagaatggtgtacaatttaaaacgagtgactggtttccggaattttccttttaatatttttggaccatggttgaccataagtaactgaaatcaaaaccatggatgagtggggggactactgtctttgcttaaagggcctttttgaagttaactgaagccagctgttgcaaccttgtagagaagaaccacttaccagcccacaaaccttatttatccttaacaagcccaatattcactacagacaaaataatagaccacaggtaacattttatatcaattagcagccccttacactaagtcatttgttctcaaacttgagcctgttgtagattcacaggttgctggccccacctgtctgggattcagtgggtctgggaatttgcatatctaacaaattcctaggtgatggtgttgccccctcacactcctatcaggggatcatgctttgagagcctctgcactgaactgtaaatgttaagctgtcatatcattttgagtccttgaaaccatgtctccacagttcatattccccagccaccagagtcgggaggatctctctccagatcttgattcctaccagtcccttaaacaattgcttacattttcctgatcctccagacattcaggatcagcccctctacacctccccaatccctgctctccataggagctgtttctagttttccttaattttctatttggccagattcgttgctttaattttctccttgttacaggcagagttacaggctgttcaagaaaaccaggcatcactgtagtggaaggggttgccggctcagccattttccagtagtctttgataagtgagcccccacattccctgggcagcaggccccattctctagggcttctttgcataaatctgcagctccccctcatcctgccattctgtgtgtgccatctgcctctggggctgaccttatctgctcctcgcagccttcagaggacaccttctgggcagtttggctccttctgctccaaccaccccaacattgattcctttctttttctcctgcatatttttgaggtgatactttgttgatgattctggttgcattttttaagagggacataatctgccagagctcttctctaggccccctccctgtgcctgcatgataatcctttctcctccttcctttccagcttctttgtagaagtttgttttgtaaaatgagataaaggcagtacaggaactagttcccaattgctgctgtgcccagagagggctagagattgcggggtggaaaagtgggaggacatcttaaagtcagaggtcaaagcaacgtgtattaactccatcatcaggtagcactcttaacctgggccaggcaccatgaggccagggcctgaacttgacttctgggaaaggttatgcagagcttgaaacagatggggtatatgtttgttgggagaccttagagacaattacagaaaactttaatgtattttagtcatctttgcttttactcactattcctgaaaaggcaggctgtactagatggatactgcttttcctattaacccattagtgatggggtcagaaggctgaggcctggcttaccctcaaggcccagtagcacttctgcttgcttcccgcctgcctttactactaacaccgagactcatcaactcactggcaggtagacagggagctggcatgggcccttgggaagtcaagctgtaggtgaggatgaactggaaggctttgacaactaagatacacagtcataagctgggaagccagagagaagtggaaacagcagccatgatccactcctgtaagaccctttgcctgacatggggctgcttttactgtctcctactgtggcccaaaagggaagtgagtgtgagttcccctcaaaatctagttctctctccaaattcccttaaggcttgaaccttctgtcccggggtcagtgacagaggcagatggaaagctgatgatgggaacagaaaggtggctttgggtctccatgtagtcatttttagctgtgcaaatctgagtaaaatcttacaaacaaggaacttgagattcaactcccatttttccaatgaggtaacaaatacccacttcatagggctatgatgaagactgatataaaatgtaatattggcagttagctccattttctctatcttccttcactgtttccagcaaatacagcaggactgaactatgtgatgacttcattctctttgctcaaaaaggattccaatctctgagcagtgtgaggaccaggaaataatggtagagagtgtcatctgtggattaagcatgttaaatacaagtggtaggcagaattctaaagatgtcctcccttgattgctgtcttctggttattcattccaacagtaatctaggtactgctgcgaagggactttgcagctataattaaggctatgggccttaagatatgaagatcactttggattaccaagtgggtgcaatctaatcacttgagcccttagaaacagagaaatgtctctggcaggagttagaaagatacagtagtcagcaagattcagtgtgagaaaaacttgaccacccattgctggttttgaagatggaggcagacaggccaggagcctaggaatgtggggagcctcaagaagctgagaatgatgcccagccaacagccagtgggaaacagggatcttagtcctagaactgcaaggacccagagcctctagaagggaacacgccctgcgaacacctttattttggcctcatgaaacctgaaacaaagaaacagttgagccacctcagacttctgaccttgcaacaatttgttttggcagcaacaggaaatacaaaaggtatttaagctgcctcaataaatcctaggaggtagatactatcattacccccattttacagagtgggagactgaagcacagtgaaaaggctctgagaaagtcggctggcctaagtctcaagaacagtcattcatggtggaagtgtttgctaccaagtttatttgcagtgttaacagcacaacatttacaaaacgtattttgtacaatcaagtcttcactgcccttgcacactgggggggctagggaagacctagtccttccaacagctataaacagtcctggataatgggtttatgaaaaacactttttcttccttcagcaagcaaaattatttatgaagctgtatggtttcagcaacagggagcaaaggaaaaaaatcacctcaaagaaagcaacagcttccttcctggtgggatctgtcattttatagatatgaaatattcatgccagaggtcttatattttaagaggaatggattatataccagagctacaacaataaacattttacttattactaatgaggaattagaagactgtctttggaaaccggttcttgaaaatcttctgctgttttagaacacattctttagaaatctagcaaatatatctcagacttttagaaatctcttctagtttcattttcctttttttttttttttttttgagccacagtctcactgtcacccaggctggagtgccgtggtatgatcttggctcactgcaacctccacctcccgggctgaagtgattctcctgccttagccacctgagtagctgggattacaggtgtccaccaccatgaccggctaatttctgtatttttagtagagatggggtttcaccatgttggccaggctggtttcgaactcctgacctccagtgatctgcccaccttggcctcccaaagtgctgggattacaggcgtgagccaccatgcccaggtttcaagtttccttttcatttctaatacctgcctcagaatttcctccccaatgttccactccaacatttgagaactgcccaaggactattctgactttaagtcacataatcgatcccaagcactctccttccattgaagggtctgactctctgcctttgtgaacacagggttttagagaagtaaacttagggaaaccagctattctcttgaggccaagccactctgtgcttccagccctaagccaacaacagcctgaatagaaagaatagggctgataaataatgaatcagcatcttgctcaattggtggcgtttaaatggttttaaaatcttctcaggtgaaaaattaccataattttgtgctcatggcagatttccaagggagacttcaagcagaaaatctttaagggacccttgcatagccagaagtccttttcaggctgatgtacataaaatatttagtagccaggacagtagaaggactgaagagtgagaggagctcccagggcctggaaaggccactttgtaagctcattcttggggtcctgtggctctgtacctgtggctggctgcagtcagtagtggctgtgggggatctggggtatcaggtaggtgtccagctcctggcactggtagagtgctacactgtccaacacccactctcgggtcaccacaggtgcctcacacatctgcccaattgctggagacagagaacacaagcagagattagtgtcaattcattctcctggactaggctctaatcaatcgactccagggtcctggttgtatgagttcttaggattaatgaggtagaagctaattttttttttttttttttgagacggagtcttgctctgtcgccgaggctagagtgtgatggcgcaatctcggctcattcaacctccgcctcctgggttcaagcaattctcctgtctctgcctcctgagtagctggaattacaggcacatgccatcacacccagctaatttttgtatttttagtagagacgggggtttcacaatgttggccaggctgctctggaactcctgacctcaggtgatccacccaccttggcctcccaaagtgctgggattacaggcgtgagccactgcacctggcctttttttttttttttttttttttttgagacggagtcttgctcttgttgctcagcctggaatgcaatggcacgatctcagctcactgcaacctccacctcccgggttcaagcaattctcctgcctcagcctcccaagtagcagggattacaggtgcctgccaccatgccaggctaattgttttttcttttttttcagatggagtctcactctgtcactcaggctggattgtgatggtgtgatctcagctcactgcaacctcaacatcctgggttcaagcgattctcctgcctcagtctcccaagtagctgggactacaagtgcgtgccaccatgcctggctaattttttttagtatttttagtagagatggggtttcgccatattggccaggctggtctcaaactcctgatgtcaggtgatccgccctgaggctgaggcaggagaatcatttaaacccaggaggcggaggttgcagtgagccaagactgggccactgcactccagcctgctaagtgacagagtgagactccacctcaaaaaaaaaaaaaaaaggcaatgcttcaggacataaggccttgctctgaagaggccctaggagtgactcctggtgacagtgaaagcccacagcctctggcaactgtattaacatgaacttcaatctgttaaaggaaagccaccaggaaaacagcactgtaatttaacgatgtggaaaaatgtatgtaatatcttaaggaaaaaagcaaaacagtgtaattatgatcacattttataaaatacacgtgtatatatacgcacatatgcctggtggagttttatggtgatcatctccaagtggtggaattactgggattattttattgtttttgtgtaaatttatactttcttttttctttttgagacacggtctcgctctgtcgcccaggctggagtacagtggtgtgatcgtggctcactgaagcatcaacctcctgagctcaagtgatcctcccacctcagcttcccaagtagctgcgactacaggcatctgccaccacacccagctactttttaaatttgttgtacagatgaagtctccttatgttgcccaggctggtctcgaacttctaggctcccaccttgacctccatcttgacctcccaaagtgctggaattataggcatgagccaccatgcccggccttgatttatgtttttgtgatgaacattcatatcttactcccaccccatggaaacagttcatgtattacttttacaatataaaacaaataacaataaaaacatcaaaaagacattttagccattcattcaacaaatatttaaaatgtgccaagaactgtgctactcaagcaccaggtaatgagtgataaaccaaacccatgcaaaaggaccccatatagcacaggtacatgcaggcaccttaccatggaagccattgtcctctgtccaggcatctggctgcacaaccacaattgggtggacaccctggatccccaggaaggaaagagcattcaaagtgtcaaagtaggactactggaactgtcacttcatcattttttttgtttgtttttgagacagggtcttgctctgtcacccaggctggagtgcagtggtgtgatctcagctcactgccacctctgcctcctgggctcaagcaatccttccatctcagcctcctaagtagctggaactacagacacgtaccaccacccctggctaatttttttgtatttttggtagagacagggttttgccatgttgcccaggctggtctcaaactcctgggctcaacttcacccccgggattataggcatgagccaccgcacccagccttggctaatttttaataatttttttgtagacatgaggtcctactgtattgcccaggctggtcttcagctcccaggctcaagcgattctcccaccttggcctcccagtgttgtgattacaggggtggggcactggcccagcccatcatttctctctctctctttttttttgagacggagtctcgctctgtcgcccgggctggagtgcagtggcgcgatcttggctcactgcaacctccgcctccggggttcaagcgattctcctgccccagcccctcaagtagctgggactacaggcgtgcgcccctacgcccagctaatttttgtatttttagtagagacggggtttcgccatgttggttggccaggatggtctcgatctcttgacctcgtgatctgcccacctcagcctcccaaagtgctgggattacaggcgtgagccaccgcacctagcttttctctctctctctttttttttttttttagacaaagtctcactctgtcacccagtctggagtgcagtggtgcaatcttggctcactgcaacctctgcctcccacgttcaagcgatgctcacacctcaacttcccaaatagctggcattacaggcatgctccaccaggcctggctactttttgtttttttttttttagtacagatggggtttcaccatgttggccaggctggtctcaaactcctgacaagtgatccacctgcctcggcctcccaaagtgctgggattacagacatgagccaccatgcccagcctccagcccatcatttcttgatgatttgttgaaacacagtatgctggggcagtcacagagaggagggggagggacatatgggaaaaagagttagagggaaaaagtcttccctcagtatatttaatatgtgcagttctcaaatccttacccatcccttacagatggagtcttttggcacaggtatgtgggcagagaagacttctgaggctacagtaggggcatccatagggactgacaggtgccagtcttgctcacaggagagaatattgtgtcctccctctctgacagggcacccaatacttactgtgccaagggtgaatgatgaaagctccttcaccacagaagcaccacacagctgtaccatccattccagttgatctaaaatggacatttagatgtaaaatcactgcagtaatctgcatacttaacccaggccctctaccctacactctccggatgaaggcttatagcaagacctctcaatgggagagtctgtctctctgctccaaaggacaatggtcttaaaatagtaggggtatggattttaagtcaatttgccactgatatgccatgtactctggttatcagtctccataaggccacttggtataaggtttgatagtctctcaaataaaatgcttgaaagaaaaaaaaatcaaagatctaatttccattaatttgctaaattgctggctaagacactgtgtgaaaaaacacccaccttccttccctcccttcctcccttcatcctaattctgtgttggtaactgataatcacggccactgaaaataccatacttggtggtaattactgtaaatgtcaagagatgggaagataattcatccagtcaaaaaaatacatgttatcctggttagagactcagcagggaaaggctacatgctgagctggaatccatatactcaggggaataaaaatcagaagagactgtggagatgctgtgtacctggaaaatcagaactgcccaatgggctctgttggctgtgttcttcaagacattcatgtatgttgctctttcccatcagcccgtttctgggaattgctgaggtgctcctgtctgtctgactgaacgaaggttgactaactcacccccaaaataatactttctggcaaccctggtttccactataccaaagtaaaaaaacactgagaaatccttgagtggaacttggaaatttcataaaaatccaattgataactaataaagaggatggaaacaaaattacattgcagccaggttttcttgctgtcactcatctgcctgtgaccagatgctaaggcctttctctaaggtgtaagaggacctaagtccctgggcagaagcaggcacaggaggcaaaggtgggtagcttttgctgtgaaaagaacaaaccaaatttatacacacaccaaggcctttgtgctgcgcaactccagaggtaagctttatagcagtcctaagcataacattgtattaagtgtcaagtttaattagaaaatgttcatggagagggctgggcacagtggctcatgcctgtaatcctagcactttgggaggctgaggcgggtggatcacgaggtcaggagatcgggaccatattggctaacacggtgaaaccccgtctctactaaaaaaaaaatacaaaaaattagtcgggcgtggtggcacacgcctgtagtctcagctatttgggaggctgaggcaggagaatcacttgaacccgggaggtggaggttgcagtgagccgagatcgcgccattgcactctggcctgggcaacagagactcgacctcaaaaaaaaagaaaaaaaaaaagaaatgttcaccgagaatcttcccctgctctgggcccgtccgtggtgggccagctgctgtgctttcttctatgtaagtaaattaagatggtttaggaagaggagaactcctccttgatttttacctatccaaagatattttctcactaacatgttggcactaacagcagctcaacgccatctgaacacataacatactgaatcctaactattaaccaccttcatgctcttgagaagggggacaaggtatagtttttttttgccataggataacatttaggtgctgttttgtttggagagtggtagagaaatagaatagcctctagaacatttcagcaatctgaggaacccccatcgtgggatcttgcttataatactccactatgtaagacaaaggctggtgctggaactctggggttctcccaggctcttacctgtgggcatgttggtgaagggcccatagcaacagatttctagccccctgaagatctggaagaagagaggaagagagagggacaggggaatggagagaaggaaaatctagttataaaagaatattggcttttattcaaaaaacagactttcaaaaaggaagagcttttctttttcttctgttcaccacctgatgatttctgctgctacttcccagggacaagcagtccaatgtccagaacactactggatttcagaagatcttcttgaagtgcatatgtagttgacctgcactctacaggcattctttgtcattcaaggactgagcatctcacttttgtcaccaatcaggccaaggctcctccctaatgatctctgcaggtgctttaacttgttagatgcaagggaaaaaaggtccttctgtatgtttaataagaggcttggatggctagaaactcaaagttattggctgaagtttgatgtttatccagacttggtacctcaagtactcactatgaccccatcaacagaggggtctatgttgattttaggtgtacatgctccttgtctcctctgacttttttttttttttttgagacggagtctctctctgtcacctaggctggagcgtagtggtgcgatctgggctcactgcaacctctgcctccagggttcaagcgattctcctgccttagcctcctgagtagctgggattacaggcgcgcaccaccacgcccggctaatttttgtatttttagtagagacagggtttcaccatgttggtcaggctggtctcgaactcctgacctcgtgatctgcctgtcttggccttccaaagtgctgggattacaggcataagccactgcgcccggccctctctgactttcttctagccccctaaacatctgttccttccttctcactactctgagaatggccattgtatctttaggccacctaagcagtttttaatctagaagtgaagccaggttctgcctctcctcattgaactagtctgactacctggtttcctgaagacacagatcacactgcactgcctcttccacttacagggcttggcaacactgttcaaaacaactttctgtgatagtcacaatgttctatatctatgctaataaggtagccatgagtcacatatagttattgagcactggagatgtggttagggtgaatgaagaactaaacttcatattttaatttttttctttttttttgaagagatgaggtctcattctgtcactcaggctggagtacagtggcacgatcatagcttgctgcagtattgaacttctgggctcaagcaatcctcttgcctcagcctcctaagtagctgggactacaagtgcacaccaccatgactggctaatttgtaaaatttaaatttaaacagtcccatgtggctggtggcaacagtgtgggacagtgcaaattctcataaacacactggcataggttcttagcaaataacttgggtatcacttaaaaataaaccctaaaattgtatcattttggatggatatgttttgggtgactctcagtgtcttgaccttcccattgcaataaaaagaaaattgccaaggcctaaaattcacctggcttcaaagagactgcgatagagaaaaaaatcaggaagctaaaaatacacggatggccttttagaaagtggtcaccctcccccttgacagacagacggacagaaacacacacacacacacacacacacacacacacacacacacacactctcttactttaccgccagagtgaaaagaaatggcagtaggacaagtctgtgtgttttttttttttttttgagacgcagtcttgcactgtcgcctgggctggagtgcaatggtgccatctcggctcactgcaacctccacctcctgggttcaagtgattctcctgcctcagcctccctagtagctgggattacaggtgcacaccaccacacccggctaattttttgtatttttagtagaaacggggtttcactatgttggccaggctggtcttgaactcctgacctcatgatccacccgcctcaggctcccaaagacaagtctgtttgttttaagggacagcatccatctgtgccactctcactacctgtatgaataaaccgcacccccaacctgttgataggacctgcatgctcataatgctagaagttctccccaggcagccaagtggagccaaatgctgacatgaaaagtacaaaagattaggaatgtttatatccaggctaacactcagtgatgaggatgcctagttatgagataagaaatttgaagtttcgggcttggcgtagtggctcacgcctgtaatcccagcactttgggaggctgaggcaggcggatcacgaggtcaagagatggagaccatcccgtctaacacagtgaaaacccgtctctactaaaaatacaaaaaattagctgggcatggtggcgggcacctgtagtcccagctacttgggaggctgaggcaggagaatggtgtgaacccaggaggtggagtggagctggtagtgagccgagacggcgccactgcactccagcctgggtgacatagcgagactctgtctcaaaaaaaaaaagaaatttgaagtttcaggccgggcgcggtggcctgtaatcctagcactttgggaggccgaggtgggtggatcacttggggtcgggagttcaagaccagcgtgaccaacatggagaaaccccatctctactaaaaatacaaaatcagctgggcgtggtggcacatgcctgtaatcctagctacttaggaggctgaggcaggagaatcacttgaaccctggaggcagagattgcggtgagccaagatcacgccattgtacttcagcctgggcaagaagagcaaagcttcgtcttaaaaaaaaaaaaaaagaaatttgaagtttcacctctacatatacatttctcttccagagaaaaatactatggtgacatttagtattttcagaatgtcattactttgaccacatactttccatcattgctattctgcatggaggaaaaaatccaaagcactagaatttctttttaaagaggggaagaatctggtgctaatactgcctagcatacagtggaggaaaaacagaggactggctcacatggcgctcccctgtggtaaaggcagaagcagaaataaggccagcagcttttcttggcatctggaacaattacttgataggctcagaaggtaaaaacaggctgacctcagcagttcaaaactccaggcttcatttgtgatcatgtcccaaagcagttttccttaggaaattacctctactggttccctcttaagtttctataaagggacagaaagtgctcagtagaaggatgttttgttttgttttgagacaaggtctcacaatgttggccaggctggagtgcagtagcaccatcatggctcactgcagcctcgacctcccagactcaagcattcttctcacctcagcctcctgagtagctgggaatacaagagtgtgctacgacacccaattaatttttaaatttttttgtagagacagggtcttactatgttgcccaggctagtcttgaactcctgggctcaagtgatcctcctgccttggcctcctaaagtgctgggattacagaagtgagccgctgtgcccagctgggattttttttttttttttgagatgaagtctccctcttgtccccaggctagagtgcagtggcgcaatcttggctcactgcaacctccgcctcctgggttcaaccgattctctagcctcagcctcccgagtaatcctgagctaggattacaggtgcctaccaccacgcccagttaacttttgtatttttagtagagatggggtttcaccatgttggccaggctggtctcgaactcctgacctcaggtgatccacccgccttgggctcccaaagtgctgggatcacaggtgtgagccaccgcgaccagcctgggatgttctgaaatgcctggtagtgcacacttgaaaaaggaagaaaagcagactgggaacatagcacttagggagctgagaaagcagccagctcaggcctgacaggtaagtgtgaaatcttgcagactttctccctgtgaggaagtcagagttctggctaagtcatctgctacaatatgatcaggagaaagtcattgagtcttcttgggtctcatctgcaaagttgttagaatgctccattttttttccctccgtgaagccttcaacaacttttcaagaaactatagtattgttgttaagagtttagaattggaggccgggtgcagtggctcatgcttgtaatcccagcactttgggaagccaaggcgggtggatcactggaggccaggagatcaaggccagcctggccaacatggcaaaaccccatctctaataaaaatataaaaattaaggccgggtgcagtggctcatgcctgtaatcccagcactttgggagcctgaggcgggcagatgatctgaggtctggaatttgagaccagcctggccaacatgttgaaaccttgtttctattaaaaatacaaaaaactatctcggtgtggtggcacgtgcctgtaatcccagctatttgggaggctaaggcacgagaatcacttgaacctgggagctggagactgcagtgagctgagattgcgccactgcactccagactggccaacagaatcagacaaaaaattagctagttgttgtggcacatgcctgtaatcctagccacttgggaggccaaggcacaagaattgaacaaggtttgaacttgggaggtgaaggttgcagtgagcagagatagtggcactgcactccagcctgggtgacagagtaagactctggcccgaaaaataaattaacaaagaatttagacttggagctagacttcctgagttcaacttctagttccatcacttattacctgtgtgactttgagcaacttattcaacctctctgagcctcaattttcacatctgtaatataggcataattacagtacatagctcatagagttgtcataaaattgttaattagttaaaacatggttgggcctttagagcagtcccagcataaagtgatcttttttttttttttttcttttgagatcttctgtctgtcgtctaggctggagtgcagtggcgcaatctccgttcactgtagtcccctcttcttgggctcaagagatactctcaactcagccttccgagtagctggaactacaagtacatgccaccacgcctggctaatttttgtatattttttttggtagagatggggttttgccatgttgcccaggctggtatcgaactccttggctcaagcgatctgcctgcctcagcttcccaaagtgctgggataacaggaacgagccgctgtgcctggcccagtgaacattatataaattttagctattattggctgggcacggtggctcacgcctatcccagcacttggggaggccaaggcgggaggatcacaaggtcaggggttcaagaccagcctgggcaagatgagttttcagtgagctgagatcgcaccactgcactctggcctgggcaatggagtgagactccgtcttgggaaaaaaaaaaagagagagagagagcaagagagagagagagaaagacaccccagtgaagtgaaaagagcaaagtctttagattctcatctgcttaaagtcccagctcttccacttatcagctaagatctgaacccgagacgggaatccaaattacacagcctctctaaatctcttagttttatcattcataaagtagagacaatacttatttatgtggttgggatggaagagtgaaaaaagaacctgtgtgaaagtatctagcactgtgtatgtatgtaataagtcttacaaaatgaagcggcccatctctgcaaaggggagtggaatacagagtggtggggtgagatttttgtcaacttgagggagggagctttacctttctgtcctgggattctcttgctcgctttggaccttggtggtttcttccattgaccacatctcctctgacttcaaaatcatgctgaaagaaaccaaacacaacccatcaggataagagaaagagaagcttccttcaatggaagtggagcagacacgtcatatttaaggcattcaggccaggcgcagtggctcacccctgtaatcctagcactttgggagactgaggcaggcagatcacttgaggtcaggagttcgacaccagtctgaccaacatggtgaaacctcatctctactaaaaatacaaaaaattagttgggcgtggtggcaggcacctgtaatcccagctacttgggaggctgaggcaggagaatcttttgaatgcaggaggtggaggttgcagtgagctgagatggtgccactgcactccagcctgggtaacagagcgagactccatctcgcatctcaaaaaattaaaaataaaattaaaaaaaaaaaaattaggccgggtgtggtggctcacgcctgtaatcccaggactttgggaggccgagacaggcggatcacgaggtcaggagatcgagaccatcctggctaacacggtgaaaccccgtctctacttaaaatacaaaaaaattagccgggtgtagtggcaggcgcctgtagtcccagctactcgggaggctgaggcaggagaatggcgtgaacccgggaggcggagcttgcagtgagcggagatcacgccactgcactccagcctgggcaactgagcgagactccgtctcaaaacaaacaaacaaacaaacaaaaaaaccaaaaattagctgggcgtggtggcatgcacctgtagtcccagctactcgggaagctgaggcatgagaattgctggaatccaggaggcagaggttgctgtgagccacgatcatgccactgcactccagcctgggtgacagagtgaaactctgtctcaaaaaaaaaaaaaaaaaaaaaaaaaatttaaggcattcagaattgccaggcaggcagtagctgggcaccaatggctcacacctataaccctagcactttggcactttgggaggctgaggcaggaggacagcttgagaccaggagctggagacccagctgggcaacacagtgagaccccttctctagaaaaaagatacataaaacctcagccaggcatagttgcatgtgcctgcagtcccaatttcttgaaaagctgaagctggaggatcacttgagcccaggagttggaggctgcagtgaactgtgatcataccaccacactcccgcctgggtgacaaagtgagactctgctaaaaaaaaacacacacacacacacacataaaacaaaaaaaagaaagaaagaaaaagaattgctgggcagagatttgaccaaaagcaagtaaaatcattctttttggtagaccaggtgaaatgactaggatctcagctgttgaaatcaattcactgaagcaaatcttttgtgtgcagaacttaacaatcggcttttcacctcactgggacttaatgtattttaattttcaacatctatctcctctcaaaacattcacttagcatttagattagactgctaatactgtgctgttataaaggtaactgaaaaattccctatctcctaaatcaattgtatattatcatctaaggaaataaaggcttttcagatttccactgagagatttacagttaacacaaccaaaatgataaaatatacattcaatgcactaaagaaagttagaggtttttcataattactattatgactggtcatggacatgagaataaagaataatgagactggggagaaatttgaggaagaacgctcagaaacaattctgactgaaactcagattgtagggaaggccttatgtgttgccaagagtattgtgaagaaaactaaaggcaagagtataaccactggctattactaggggaagaatatctgacatttcctagttacttgaatgaggagtctagtgataaatttgtcagaagactcccatgttcatagtcctccttgtacccctgagcttcatacaatgtgtccaactgcctacttaacttctctatccagaagtctagtatacatctcaaaattcatgcatctggccgggcacagtggctcacacctgcaatcccagcactttgggaggccgaggtgggtggattacctgaggtcaggagtttaagaccagcctggccaacatggtaaaaccccatctctactaaaaatacaagtattagccaggcattgtggcaggtgcctgtaatcccagctactcgggaggctgaggcaggaaaatcacttgaaccgggaggcggaggttggagtgagctgagatcgtgctaccgcactccatgcactctagcctgggcaacagaacgagatgctgtcacaacaacaacaacaacaacaacaacaacaacaacaacaacaacaaattctcacatctaaaacagagttcctggttccattcctgcttcctgcctttcccactcccccatattccctaccatgccttcttcatctaatttaatattactaacaagatctattgttcaagccaaaacccaagtgtcactccttcaatttctctttaccttatcctccaaatttaatccattagcaagtcctctcttcaaacccatcccaaaccaaccttgtttttaaccatctccacaccaccaattaccacaaggataaaatctgaattccttaccaccaaatactatgtgatctggccctcatctatgaccttctcccattccttgtgtaatctctgcctccacacataatttgcaaattactccagctacactggcctattattattattattattatttttgagacggagtcttgctctttcgcccagcctggagtgcagtggcgcaatctcagctcactgcaatctccgcctcctgggttcaagcgattctcctgccccagcctcccaagtagctgtgattacaggcacatgccaccattcccagctaatttttttttgtttttgagatggagtttcactcttgttgcccaggctggagtgcaatggtgcgatctcagctcaccacaacctccacctcccgggttgatgaagtgattctcttgtctcagcctcccgtgtagctgggattagaggcacgcgccaccacgctgggcaaatttttgtatttttagtagagacagggtttctacctcagtgatctgtccgccttgacctcccaaagtgctgggattacaggaatgagccaccacacccagccgtgcccagctaatttttgcattttttagtagagatggggttttgccacgttggccaggctggtctcaaactcctgacctcaggggatctgcctgcctcggcctcctagagtgctggaattacaggtgtgagccactgtgcccgaaccttttatcattattatttcttgagacaggagtcttgctctgtcgttcaggctggagtgcagtgatgcgatcttggctcactgtaactcctacctttcggttcaagtgattctcctgcctcagcctctggagtagctgggattacaggcactgggattacaggcacacaccaccacaccatgctagttttttgtatttttagtagagatggggtttcaccatgttggccaggctggtctcgaactcctgacctcaagtgatttgcctgccttggcttcccaaagtgctgggattataggcacgagccaccacacacgaccaacattggcctatcttttaaaaaataaaccaagctctggccgggcacagtggctcacacctgtgatcccagcactttgggaggttgaggtggttggatcacttgagttcaggagtttgagaccagcctgaccaacgtggtaaaaccccatctctactaaaaataaaaactagtcgggtgtggtagcacgcgtgcctgtaataccagctactcaggaggccaaggcaggagaattgcttgaacccaggagacagagtttgcagtgagccaagattgtgccactgcactccagcctgggggatagagggagacaccatctcaaaaaaaccaaaatacagaaatcaaaaaaccacactcattattacctcaagacctttatgtttgctattcctctgcctataagatgcattcccttcatttttcaaggacaattatttcttgttatttaggtctcagctcaattttttcagaaaggctttccctggcctccttaaacgaaagtaatcaacaacctttgacagctaatactattccactgttctgtatatttctccatagcatttattgttatcttaaattcatctttattgtgtatctcccctcgacagaacctgaatcctaccagggacttagttagtcttatttactgttgcattcctagtgcccagaacacagtaggctcccaataaatagccactgaataaaagttaaaaccaacaaaaataatcatttaattaattatgaatacatcgaattgtgcacaatagtttataaaattactttttttttttttttaagacagggtctcattctgtctcacaggctggagtgcagtggtgcaatctaggctcactgcaacctccgcctcccgggttcaagtgattctcctgcctcagcctccccagcagctaggattacaggcacatgccaccacgctcgactaatttttttgtgtttttagtagagacaaggtttcaccatgttgaccaggctggtctcgaactcctgacctcaagtgatccacctgccttggccactcaaagtgctgggattataggcatgagccaccacgcctggcctataaaattactttcacatttcattttgcctgatctgttgtcacagaagttctcagatggctgttctgaaattattcctcctcctacactctatcttatttacttctcactgttctcagtatcataaagtgcaacatctttttgaagcaatctgaattataaacagatacatttgcatgtatatatatgtatatatgcatatgcacacacacacttttttttttttaagagacagggtcttgctctgtgcaagtgcaagagtgcaatggtatgatcatagctcactgcagccttgaactcctgggctcaagtgattcttctggcttagcttcctcagtagctaagactacagaagcacactgccatgcccggctaattaaaaaaaaattttgtggagacagagtctcactatgttgcccaggctggtttcaaactcctggcctcaagtaatcttcctgtctcagcctcccaaagggctgagattataagtgtgagccactgcatctggactgcatattaatatgaagagcttttcttcaacaacagtgaacagttttctacaaaggtatatgcaagtgggcccacttcttgttcttatgaatcttttctttccttttataaaactccttttcctttctcttttccccaaagaaaggactgtttcttttgaaatctagaacaaatgagaacagaggatatcctggtttgcgctgcaaaattttttttttttttaagacggagtctcgctctgttgccaggttggagtgcagtggcacgatcttggctcattgcaacctccacctcccgggttcaagagattctcctgcctcagcctcctgagtagctggaactaaaggcgcatgccaccacgctgagtaattttttgtattttagtagagacagggtttcaccatgttgcccaggctgatctcgaactcctgagctcaggcaatctgcctgtcttggcctcccacagtgttaggattacaggcatgagccactgcacccgattttttttttcttttgatggagttttgctcttgttgcccaggttagagtgcaatgatgcgatctcagctcactgcaacccccgcctcccaggttcaagtgattctcctgcctcagcctcccgagtagctggaattacaggcaagtgccaccaagcccggctaattttgtatttttagtagaaacggggtttctccatgttggtcaggctggtcttgaactcccgacatcaggtgatccaagcgcctcagcctcccaaagcgctgggattataggtatgagccacagtgcaggcctgcataattcttgatgatcctcattatcatggaaaatttgtgcattgttaaggaaagtggtgcattgatggaaggaagcaaatacatttttaactatatgactgaatgaatatctctggttagtttgtaacatcaagtacttacctcattcagcatttttctttctttaatagactgggtcacccctaaagagatcatagaaaagacaggttacatacagcagaagaacgtgctcttttcacggagatagagaggtcagcgattcacaaaagagcacaggaagaatgacagaggagaggtccttccctctaaagccacagccctttaataaggcttgtagcagcagtttccttctggagacagagttgatgtttaatttaaacattataagtttgcctgctgcacatggattcctgccgactattaaataaatccctagctcatatgctaacattgctaggagcagattaggtcctattagttataaaagagacccattttcccagcatcaccagcttatctgaacaaagtgatattaaagataaaagtagtttagtattacaattaaagaccttttggtaactcagactcagcatcagcaaaaaccttaggtgttaaacgttaggtgtaaaaatgcaattctgaggtgttaaagggaggaggggagaaatagtattatacttacagaaatagctaactacccattttcctcccgcaattcctagaaaatatttcagtgtccgttcacacacaaactcagcatctgcagaatgaaaaacactcaaaggattagaagttgaaaacaaaatcaggaagtgctgtcctaagaagctaaagagcctcagttttttacactcccaagatcaatctggatttatgattctaaaacccctggtgacagaatcagaggctgaaaacaccactaattataaccagcaggtatggatatttggaagtctaggggaggctgatatgaagttaagaccagaggaaatatctgtccactccctcttctcaacacccatcttctagacgccaaggctagctatagatctccattatagtgttcaaggaattaggaattatccatgtcaatagttttgattaatgtggacggagaacatctatattactagatggcaatatgtgaaagaagaaaacagtattgttgaaaacctaaatctgaaatgtcaatgtaatgacaaattttcacccctagaatgtctacctggggagtcctaaccctctaatattcccctgagagggatgggagaatacagtgcagagcttttatataagtatttcagaaagcagtagctaaagaatcacttgtttatttcccagtgtttcaaaggcccttctgaagaactaagcaaactaaggaaagaccatttagttttaaacaggagaaatgtatttaactaaatcctaaacacagcaggctatctgcaagcagcagcagcagcagcagccatgctccctcacagaatccttacaatttttgaagttttttgtttaactgctacaaaagccgatttagtaacatttattacacttaaaaacttcagttcatttgtagttcaaagcaaatgtattggctttgagtttaaagactgaactactttagatttgatttgcatttttttttttttttttttttgagatgcagtcttgctctgtcagccaggctggagtgcagtggctggatctcagctcacggcaagctctgcctcctgggttcatgccattctcctgcctcagcctcctgagtagctgggactacagatgcccgccaccatgcccggctaattttttgtatttttactagagatggggtttcaccgtgttagccaggatggtctcgatctcctgacctcgtgatctgcccgccttggccccccaaagcgctgggattacaggcctgagccaccacgcttggcatctttttacctttcattaactttgatgcaaacctatagcttaaggtatcttaaactttaatgacatttttctctaaaatagtagtttgtaataacttgttctggcacctggctccaatgaacactaccctctgaccctgtggtataattttcatgagtaagtggaaacctaagatcttagaagttcaacggcaatgtgtccaaggggtttagatcctctccttaagtgcctgtatctctgtgaaaagaatcatcataggctaggcgcgatggctcacacctgtaatcccagcactttgggaggccgaggtaggtggatcacctgaggtcgggagtccaagaccagcctgactgacatggaaaaaccctgtctctactaaaaatacaaaattaggtatggtggtgcattcctgtaatcccagctactcgggaggctgaggcaggagaatcgcttgaacccgggagggggaggttgcagcaagccaagatcgtgccattgcactccagcagcctgggcaacaagagtgaaaaactacacctcaaaaacaaaaacaaaaacaaaagaatcatcatcaagtgaactggaacacatccagagaactaattttgttagaaagattttagagttgagccacacaatctgcatcttctgcgtcctccatgcactcgtctgctttctggagccccatgagtgagtcttaatcctgttccagataacagttctcttccgggtaacggttcttcagatacttgaagacagtgtcttatttccttaaatcttctcatttcttcttcaaaagacagtatttcaagttacttttatgtatctttaccatctacctctggataaacactctccaatttgtcagtgaccatgttaaaaaccaagcacggtgcttaaaactgacatcatctttcaggcaatcactccattggagaatacagtggggctctggatctgtacttcacttgctccagagcctctgcttgtgttaatacggcccagtttcaaataagcatttttagcagccctgaaatgtgtactcagatttagtttatagtcaactaaaaacacccagaggtctcctgtattacacaagttataattaaaaccttaaaagagaaaggtataggacaaatgatctgtctcctcccttttttgctttttcatatgttaagactatctcggagctgttatcagacttttttcctgaaaaactctcaacaatactcaaactaggtgttacatgaagctggggtctccaggttttgcctcacttgttctttcttttgttgttgttgagacagagtctcactctgtcgccaggctggagtgcagtggcaggatctcagctgactgcaacctcagcctccagagttcaagcaattcttctgtgtcagcctcccaagtagctgggattacaggtgcacaccaccacgcccagccaatttatgtatttttagtagagactgggttttaccatattggccaggctggtctcgaactcctgaccttgtgatctgcccgcctcaggctcccaaagtgctgggattactgatgcgagccaccgcgtccagctgcctcacttgttgttttaggacttaggctccacctcaccagtgtagtcccagcaggtagataggagttaatagttgactatctcagctcaccaccctccaaaccttttttttttttttttttttttgagacaagaatctcgctcttgtccccaggctggagtgcaatggtgcgatcttgggtcactgcaacctccacctcctgggttcaagcgattctgctgcctcagcctcctgagtagctgggattacaggtgcctgccaccacgcccacctaatttttatatttttagtagagacggggtttcaacacgttggccaggctggtctcgaactcctgacctcaggtgatccacccgcctcggcctcccaaagtgctgagattacaggtgtgagccaccgtgcctggcccacactccaaatcttaacccaaaacaaaaggaggtaaggaagcagcaaaactattatttgtctttcataaagtaattgattgactattagaagactatcatccatgctatgctcaacaaatattcttattttttcacgttttttttttttttttttgagacggagccttgctctgtcgccaggctggaatgcagtggcatgatctcggctcactgcaacctccatctccccggttcaagtgattctcctgcctcagcctcacgagtagctgggactacaggcgcacgcgaccacacccagctaatttttttattttttagtagagacggggtttcaccatgctggccaggatggtctcgatctcctaatctcgtgatctgcccgcctcggcctcccaaagtgctgcgattacaggcatgcgccaccgtgcctcgcctcatgtggttttatgcagcagatgcaaggtattctgtaaaggttcttggtatacctgttttcataacaacatgagtagtctcttcagtaattagattagttaaagtgatgtggtgttttctggcaaacttgtacacgagcatctgaaattaaatcaaatattccattatcatgagttacctctagcacacagctcagaatactagttattccaccatggcatatgtttacctatgtagcaatcctgcacgttctacacgtgtcctggaactatttaaagtgaatttttttttttttttttttagacagagtcttgctctgtcacccaggctggaggtaaaaaaaaaaaaaaaaaaaaaatagaataccagttatcctagctttaagtctctgtttttctcagaaagggtacatttaaaaaattctaagacacctgaagtctcggctgggcgcggtggctcacgcctgtaatctcagcactttgggaggctgaggcgggcagatcacaaggtcaggagatcgagaccatcctggctaacacggtgaaaccctgtctctactaaaaatacaaaaaattagccaggcgtggtggcgggcacctgtagtctcagctactcaggaggctgaggcaggagaatggcgtgaacccaggaagcagagcttgcagtaagccgagatggcgccactgcactctagcctgggcgagagtgcgagactccgtctcaaaaaaaaaaaaaagatacctgaagtctcaaataaatagtttaataaaaattatgtacacatcagcagacataaaattacaactaaggattcaaaataatattataaacctactacgtaccacaaaacttaaaacttaaaaaatatatactgggccagacacggcagctcatgcctataatcccagcactttgggaagctgaggtgggaggactgcttgagctcaagagtctgagaccaagaccagcctgggcaatacagtgagatttcatgtctttaaaaaaaaaaaaaagtaaaaagaaaaaatatatattaattttgctttaatagcagatatcattcgattccctaagatcgtttctttgcatagtgacactctactgtactataaatttatcagcctacactttataagctgagaggtaactagcctacacagaaagttatgctacagatatacatggcttaaaaccaagactcaaccctctgatagttacaaaacactgaaatcaggatgttactaaaggtcagtgcaaaagcgatcaattctctcgtaagaaggcttagaaggggttcatgttcttccccaaagaaatttagagtcctctagctattatctatcaaccaaataaaaatcaataggcagcaaaagaaattaaccagatcaattatgggcacagttgacctagctggtaggtattgtctgataaataactttgtttaccaagggccatcatttactagccatagccacagccactcacaccagtatttacgtgttgcacaatactgccatgaaggtcaggccatctttctttcatgttgcctcactccatactgccacagggcactgaaaaaaggcaggctagagaagctaatgacatcctcccccttttgctaccaccctccgccaggatcattagcaattctgaactgattaattgctgaaatcccagccttgaaactgttcagttagaagagcaatgctgaactgctgaaaagatcatcttaatatgggcttcagaattaatcatgtgtaatacagtcagtagctttcatcataaatttaccacacttcaccaagtctgaatagagctcaaagttttcctcttcgcttgtttaaagacaacatgtacccaagccacttgtagtctaatctgcagctcagaattgcctttgccaagaaagattagaccattttagccatctctaaaaagctgaacttgcaaaacaaagggataaagaacgctaattttcaatgaataaataaggaattctggacgtgcaggcaagtgatcaagagccattgaaacagacacaggtaagagctttcagagcaaattgctggtctggacatgggattatgagatgaaaacatttatagccatcactgtgcacttactcattgtatctaccagggcagccacagcttactttgcccttttagtagtgggatacatctggccacagagatgttatgctaagtaactacctatggagaagttaggatgaaaaatcctaggaaggatatattaataaagatatttcagaatgacttggtcatctctcagtgtgcaataaatggcacacccactactgaatccatttgataatctggtatgttatctcatcatagttttaaagaaatattcacgcaattcttcttcttattattgagacagagtttcgctcttgttgcccaggctggagtgcaatggtgcaatctcggctcaccgcaacctccgcctcccgggttcaagcaattctcctgcctcagcctcctgagtagctgggattataggcatgcgccaccacgcccggctaattgtgtatttttagtaaagatggggtttcttcatgttggtcaggctggtcttgatctcctgaccttaggtgatctgaccacctcagcctcccaaagtgctgggattacaggcttgagccaccatgcccggccatgcaattatttttattatgaagtgatgacaatgacaattaattacaggggtggtaaacttctcaggatgtctgaaatccacaaatagcccaagcagaaacgaggttttactggtcttaatattttaatgggtatttttccacagtatgaagcaattcccatttctggcattaaggacccaaggtgatgccaaaatcctaatagcaagggatattgcagggcagaagtggcagggcattcttacaagccaggatgaaaacaaacactagagaaatgctactatctggcagtacatttggaaccagtctgaatttagttaaatatgctggtaaattcacccatgtgagacaagggggagaaaaagatgccttctggggaataaaactatacctacttgcttttacagatagaaaggaaaattccaattcgaaagtcctatatcatacccaaagtatagcttttccactaatatttaataattattttctcaagtaaatatacataaaataatccacactatagctttatctagatctaaattttcagaaattagtaatcgaaattaaattacacagaactgtgattgttttctagatttcttcctctaggttattaattgacaatacctacataaaactctttccagaatgttgttaagtcttagtcattagggagatacatatggatacactcacaaattcttctggggtcaggccagacaccaccatggacattcttttgttgaccctttctgttgaagctgtcaattctggcttctccctgctcacactttcttccattgcattatacccagcagtatcagtagtatgagcagcagctggactctgggcagattctgcaactttcaattggggaactttcaatgcagaggttgaagatggtatgttgccaacacgagctgactctggggctctgtcttcagaaggatcagattcagggtcatcagagaagaggctgattccagattccaggtaaggggttccctctgaaaggaatgggagaagtttaatttacacaacgatgaatgttgaattacaaagttctggtctctgttaagaattaaaaagaccaataaagttaggttaagagaaaaatgggtacatgaatacagtgttggtggaaatccaaagtagcttagtttcctaaaaaggaaatatggcattatgtagcaaacaccttaacacgtatttacactttcagtcaacaatgctagttttagaaatatatcctagggagataaaagatatatgcaaaggtttagtcataggaatagtataattttagaaacaatgtagttgtccaataataggagattaaattacgatatacctagtccaatggagtactcttcacccattaatttgaatataaatgttgatgtacaataaaacagaaatgttactaatatattaaagacacctaagcaatattatttatcatgacattattttaaaaataaaagtttatgggccgagcacggtggctcacacctgtaatcccagcactttgggaggccgagacgggtggatcacgaggtcaggagatcaagaccatcctggctaacacagtgaaaccctgtctctactgaaaatacaaaaaaaaaaattagctgggcgtggtggcgggcgcctgtagtcccggctactagggaggctgaggcaggggaatggcgtgtacccgggaggcagagcttgcagtgagctgagattgagccattgcattccagcctgggcaacagagcgagactccgtctcaaaaaaataaataaataaaaataaataaataaataaaagtttatgtaaaatgactaaagaaacacagaaatattttattattaaagaataagagtacaggccgggtgcggtggctcaggcctgtaatcccagcactttgggaggccaaggtgggcggatcacctgaggtcaagaggtcgagaccagtctgaccaacatggagaaaccctgtctctactaaaaatacaaaaaattagccgggcgtggtggtgcatgcctgtaatcccagctactggggaggctgaagcaggagaatcgctcgaacccaggaggcggaggttgcgctgagccgagattgcgccattgcactccagcctgggcaacaagagtgaaactccgtctcaaaaaagagtacgggtaatatttttttttttgagaagggtctcggtctgtcatccaggctgcagtgcagtggcacaaacatggctcacctgcagccttgacctcctggactcaagtgatcttcctgtctcagcctcctgagtagctgggaccacaggtgtttgccaccttccagctgattttttttttttttgagatggagtttcattcttgttgcccaggctagagtgcaatggcgcgatctcagctcactgaaacctctgcctcccaggttcaagcgattctcctgcctcagcctcccgagtagctgggactacaggcataagccaccaagcctggctaattttgtatttttagtagagacagggtttctccatattggtcaggttggtcctgaactcctgccctcaggtgatctgcccgcctcggcctcccaaagtgctgggattacaggcgtaagccacccaccacgcctggccccagctagtttttttttttttttactttttatagagatcaggtctcgctacattgcccaggctggtcttgaactcttggcctcgagcaattctcccaccttggcctcccaaagtactgagattacaggcatgagcagtggctgtaatctgtccttattttatcttttaagaggtggcatctcagcttggtgaagtggctcacacctataatcccagcactttgggaggccaaggtaggaagattgcatgaggccaggagttagagaccagcctcggcaacataacaagacccgtgtctaaccccaccccaaattatcttttttattccctatattgtccaatttgggggcaatgagcttatagcaattttgtaagaaaggaaaaaaaagttgaaaaatgtggcaaatgctttatttttgtttcttcatccaaggtaatgacaccattacttttttcacttaataaatcagcagatatcattaccaaattaaaaacagcagagatgtcatccttgaaacatttcagaaaatgccatggtatcaggaattaagcatagctaagtagaatgtatgagattcctaaaatgaccctaatgaacatggccaaataccacatttgatgccaaacagtgtcttttatgataacgtgtttttgaggattaaaaactttctttactgattaaaactctgatttacaagccataaaacaccattcattaaaagtgatttttaaggcataaaatatgtagtcatttatattcattaactcataaaaaaaacttgctttgggatttgactcattttctaataaaggactggcctaaaactttattctttggcctttggactcttgtctaacagttgaaataaaatatatgtgtgtatatatatatatatatattttttgagatggagtcttgctctgtcacccagactggagtgcagtggtgtgatcttggctcaccgcaacctccgcctcccgggttcaagtgattctgctgcctcagcctccagagtagctaggattacgggcatgcactagcacacccagttaatttttttgtatttttagtagagacagggtttcaccatgttggccagacaggtcttgaactcctgacctcagctgatccacctgcctcggcctcctggagtactgggattacaggcgtgagccactatgcctggcctgaaataatacatttagagtacaccaagactccctcatcctcaaaatcattagttaaaccattaattaaaatatagatggattaacagtttcaataattttcaagtaaaccttgattaacacttgagctatttttctaaagtgggcttaattaagtataacaaaagtgtccatgatagactagtacatctaaaagttggttaaccagaatatctttatgtaggattcagagtaaaatcaaagtgtttgttccaatacagcagatgaaatattacctagatcttgccttggcaagtaagatgtttccgtcaaatcgtgtggcccagactcttccagctgttgctcctccacatcaacaaccttaatgagctcctcttgagatgggtagtttctattctgaagactcccagagcaactgtgcatgtaccacctatcatctaatgatgggcatttagaaggggatgacctagaaagataaatggaaggagaaaaccatcgccaccaattgtgaaaggacaaatcatacttgctgggcagccaaagcataaatgaaacagctcatgtcagagagatcagaaatgactggcaaaaaagagcccgcaagacagcctagaagtctggattcatgttgcctgccaatatgtcagggttgacatataacatggggttgggttggtctgaggcaccatatctcccagctgtttaaaagcaggtcagtagctgggtgtggtggctggcgcctgtaatctcagctactcgggaggctgaggcaggaaaattgcttgaacctgggagacagaggttgcagtgagccgagatcacgccactgcactccagcctgagtgacagagcaagactctgtcaagaaagaaaggaaaggaaagaaaggaaagaaaaggaaaggaaagaaagaaaagaaaaggaagggaggaaggaaagaaaggaagaaaggaaagaaaggaaagaaagaaggaaagaaggaaggaagggagggaaaggaaaggaaaggacggaaggaaggaaggaaggaaaggaagaaagaaaggaggaaagaataaaagcaggtcagcaaatttttaccaaattactcactgccactcactctatacacaatattctacttgagtctaaatggatatgttagaatcagatctcttatgaagatagaaagttgatcaatgtcgacatctctacactcattctttctactcagttttagcagaattcacagaatcatccctattgcctgccttttcaatgttcaaattcattctaaaaacaaaagccagctataaaatattgttagaaaagcatacacacccagtaaatagttcctctgctcttccaagtgcttaggactttgcaaaataagatacttatcaacagatttaaagggcctcagaggttaattaatttaaacaattattgggtgcttactatgggtcaaatactaaggctaggccccctggattgaagatgggtgagacctgaattactgctctctctctctttttttttttgttttgagacggagtcttgctctgtcgcccaggctggagtgcaatggcacggtcccagctcactgcaacctctgcctcccaggttcaagcaattctcctgcctcagcctcctgagtagctgggattacaggcacctgccaccacgcctggccctccagtaaggaaaagaatagtactggactacatagtccagtactggactgctatacagccctgtgttaatagtggtgtaaatacacatctctgaaagatattctaaatgttttctggctttgggagggcaaggcgggcggactacttgagtccaggaatttgagaccagcctgggcaacaaggtaaaactccatctctaccaaaaatacaaaaacttagtgggtgtgggtggcgcatgcttgtggacccagctactcaggaggctaaggtgggaggattgcttgagcctgaaaaacggaggatgcagtgagccatgactgcaccactgcaatctaggtgacacagggcgaccctgtctcaaaaaataataataatagtaattattattattattttctgtggtaaatcaacagctagactttttctagaaagacaagaattttaattagggcaagggctgccttgaagaagtctaccatcagtttccaagcttgttcaggttttacctccattatatttttttctgaccttcagaagggacatatctatctaaccgcacatttctcatgttgtagcttatgttataggttcaaaaaacctatataggattaaacaaaagaagtatcctagagcaataaaagtgtataaatgcctgtatgcaaaaaactggagaaagtatggtgaaaaaaattaacaatcagagttcaatataaataaagatgtcagataccacagcatctttacattgatgtttcttacctttccactcctggttctttatttttactggtagaactatctgcagacacctcaaacttgtcagcagaaaggccttctggattctggcttatagggtattcactacttttctgtgaagttaatactgctttaaatggaatgagaaaacaaatctactttactgctttgttctgatagtgataattcaggttagaatactgatttttttcaaaagcatcaatctatgatacacaaattggtttttaaacaagtatatcaggcagaattttataaacacaagcaatgcaacagacagatgctagcaccaaatggaattcaatgattaaaaaataataatgataataaaaggaacactttaagacagagtaaataaagacacccagctgagacaaggctgaaaaaaaaaatctatattccttggccctgaatgataaaaaatatatataacaaatttttatctctgcagcaaaataaattatgcccaaatcccctcagacaataggaaagaaagagtaccggagagcacaaagtacattattttctccatccctactgcctccacattgaagactgtatgaaatggggatttcagcttctgcatgtcgggggtaaacaagacatgagtgtcagacatgaaagaaaaaacaggtgacattttgcttcacattttcaattaccgaaaaaaaagaaaaaaacaaataaaccccctaaaccaacacatacacaaaaaaatcccaaggtgctggttgataagaaatcttaaataatacatggaactaatgatgaaatggcacaagaagggaaaaatcacaaaacatactgaaggcaaagttctggcatgttagttctttttttttttttgagacggagtctcactctgttgcccaagctgaagtgcaatggtgcaatcttggctcactgcaacctccacctcctgggttcaagcgattctcctgcctcagccttcctagtagctgacattacaggtgcctgccaccacgcccagctagtttttttggtatttttagtagagatgggattttaccctgttgatcaggctagtctcgaactcctgacctcaagtgatccacccgccttggcctcccaaagtgcggggattacagacatgagccactgcgcccagcctaattcattttgtaatatatttactcctccaaatgtatcactttgtgccactgccttctaggaagtggcttaaaggcagaagtacttatttatttatttttatttatttattttttttgagatggagtttgctcttgttgcccaggctgcagtgcaatggcatgatcttggctcaccacaacctctctgcctcccaggttcaagctgttctcctgcctcagcctcccaagtagttgggattacaggtatgcaccacctcgcccaactaattttgtatttttagtagagatggggtttctccatgttggtcacgctggtctcgaactcccgacctcaggtgatctgcctgcctcggcctcccaaagtgatgggattacaggcgtgagccactgcgcccgaccgttatttttcaacgagatgggtgtcttgctgtgttgaccaggctggtttcaaacttttttttttttttgagacagagtcttgctctgttacccaggctggaatacagtggcatgatctcggctcactgcaacctctgcctccaggttcaagcgattctcctgccttagcctcccaagaagatgggattataggtgcccaccaccaccccttggctaatttttgtattttttgtagagatggggttttaccatgttggccaggctggtcttaaactcctgacctcaggtgatccgccaaccttggcctcacaaagtgctgggattataggcatgagccaccatacccagcctggtctagaactcttaaactcaagtgatcctcctgccttggcatctcacagtgctgggattataggcgtgagccaccatgcctggccaaggcggaaatatttaataagtaaaaacaaatagttaaaaattgcaaaagtcttctattcattaaaaagtcactgatgactgtaattcattttgagcttttattagaaaagctaaaagccataaatataggtagaaaattgaaacaaaagattgtattaattaaactgtttttttaagacactgggtagcctggggggaaataatcattgatttcctgagttagtcttcaaatgcattatttatagtttcctttatgcttgtcttttctggacctgtgagtttctaggattgttaagaactctgttgaaagtaagtaggatctaactatgaagagaggtatcatcctccccacccccaatacagggtgataattgataaagggtaatgtgcaagttccaaggaaccatatcaaacggaattaaccattggaaagagttaaaaaagtggccaggtgatgtggctcacgcctacaatcccagcactttgagaggccgaggtggacagatcacctgaggtcaggagtttgagaccagcccggccaacatggtgaaaccctgtctctactaaaaatacaaaaattagctgggcgtggtggcgggtgcctgtaatcccagctacccaggaggctgaggcggacattgtaatgagccgaaatcacaccattgcactccagcctgggcaacaaaagtgaaacttcatctcaaacaaaaacaaaacaaaacaaaacaaaaaaaatgaaaggcagagggaaggctcagatacaaacacagctattaaaaagtcattcctccttttggccagaaccaccatctttcagtaatttgccaaaatgacgaacacaaagggaaagaggagaggcacctgatatatgttctctaggccttttagaaaacatggagttgttcctttggccatgtatatgcgaatctgtaagaaaggtgaaattgtagacatcaagggaacgggtactgttcaaaaaggaatgccccacaagtgttaccatggcaaaactggaaaagtctacaacgtgacccagcatgctgttggcatcgctgtaaacaagttaagggcaagattcttgccaagagaattaatgtgcgtattgagcacattaaacactctaagagccaagacagcttcctgaaacgcgtgaaggaaaatgatcagaaaaagaaagaagccaaagagaaaggtacgtgggttcaactgaagcaccagcctgctccacccagagaagcacactttgtgagaaccaatgggaaggagcctgagcagctggaacctattccctatgaattcatggcataataggtgttaaaaaaaaaaaaaaaagacctttggactgtaaaaaaaaagaaaagtcattctatcaccagaacatttagcatataaattcctcttcttactacaatgggcctcatgcaatgaagcaaataagataacttgttagaagttaacaactcaatagaacctgaaaaacagagcaaaacctttctgcttttttttctccttaatccttaattcattctctgaacagcaagcccaacctaagccttgtgacatgatgatctacttgctggctggtttaggaaagtctaaatgcagagatccagagtccaagtttcagaatattattgtagttcctcttaaatcattccctcatctagatgtcttaacatgttacattctttgtggataggaagtatgggccacaccaaacatttaataaacttacagactgcccactgtgtgctaagcattgtacagggtattgtgaagaattaaggaagacactggaagacaacagatattaagaaataataaactaggccaggcaccgtagctcccaagtaggtgggattacaggcatgtgccaccacgcccggctaattttttgtagttttagtagagatgtggtttctccatgttggtcaggctggtctcgagctcccgacctcaggtgattcgcctgccttggcctcccaaagtgctggggttacaggcgtgagccaccgtacccggcaacaatattctttttactagaagttctggccaggtgccatggctcacacctgtaaccccagcactttgggaggctgaggtgagaggactgcttgagtccaggagtttgagaccaacttgggcaacatagggagaccttgtctctacaaaaaataaaaaaaaaaattagctgggtatggtggtggacgcctatagtcccagctacttgggaggctaaggcaggaggatcgcttgaggaggtcgagaggctgcagtgagctgtgattatgccactgccctccagcttgggcaacagagcaagaccctctctataaggtgaggctcaggtcggggaggatggctcaagatcaggagttcaagaccagcctagttaacagtgcgtccctgtctctacttaaaaaaaaaattaaagaaaagaaaaaattatttttaaaaagttcatttgagtttcagttagactcacaccagatttagggagaaaaaggctcaaaacttatgttggtattaagttgtgatatccaaaacaattcagaaattaagcatttcagttacagatctccagaaaaaaataaacacacgtatataccaaagaggagatagtagatttacacagatattcaaagtcacacaataataacattttaaatcttacacattataattgaaagtctagtctgtgtttagactgaagatggtgaaagtaccctaaagaagagtattatactggggatgggactctgatctctcattatctgagagatgaactaaatgaagatagttacaaagaaagcatttaaggaaatacattttgaagcactgccatagcaacagagtttctagctagcttctttatccaagagctactgtttcttcctgaacacaaaaatactgcaaggcacaactggggaccaaagccactgttctgtataagtagcagacttgagttcctagaaagactccaagaaaggtcttaaagttcccagttggactgtggaacggggtgctgaagaaggaactttaacactcagataagaatcactgagctaggaatgaagtgtactttgggagtactcaccacccctgcatgtttctaagcagcatcctagtggggaccccatgcctagcatctcctatgtgtctgtttgtttgcccctatttaaaaatctgcctgatgtattgtctttccaattaaaaactcaaatttccatctcactttccttcatttatgccattattcctcagctcagtgctcacttcttataggaagtcagctctgatcaactgcatctgcctggttactccaatggcatcctctcagaggtccatctggattttttttgataactgtaacattgctataaagcacttgactctattgcataattaggctttctgtgttgttcttttcttttccttttgaactaacaggagctctacatcactaggctttctgtggatcaaagtgcagttcctgaagtataggatgtctctccctataaatcagaagcacattaaataggtctttgtgatgtgacaccagtgttataaggaatatgtctgagtactttttcatagctttctgaaattatggggttgcctgtcaccaatttctcccattccacttagcttccaatagagcaagagctatgttgtataccatgtatcttccatgggctccccatagcatctacttgttgtaggtactcagatgacaacatgaatgactgccttgggtccctctgactggtatattagttgtgagcagggacaagaaccaaggctccataattacccatgtgctgagcaaggatcataaaatgttggagctaggtccttactcttcagaaggagataaaggggaaggaaagaattttgcttaagatatcagtgtttggccaacaatacacacctttttctgatgtgctttgttctggatttcgcaggtcctcaagggcagaagagtcacttatgatggaagggtagctgttagaaggctggctcccatgctgttctaacacagcttctagttcagccatttcctgctggagctttatcaggttatgttgcatggtatccctctgcttcaaaaacgataaatggcaccaagaaaatgaaatactttgagaagctttccattaaatgaaaatatatcatacaaattaattttagcacaggaattgaaatcacctagtatggaactacaagttctagctgaacaccttttaatctaaccacattcatgcaattaatgcccatgaaattatttccaaatgatgttagtgagggaaaaaatcctcaaattcccccaaatagacttgatgttattgtgatgtccttttgaagttggttattttcttttaaagctagggagtgaaaaaataattaaggcatttaaacactatcgatatttaaaattagcatgaatctgttaacattttatttatatgggcacatttcaaagacttggtgttgtgagattcatcagacatttaggttagttcatataaaaatgtgtgatttttagactgatgtaatgttgaaaaaagccctctatctatggcattttataaaaatacaacaaatataaaaatactatcagtaatcctgcctagattactggcttgtgaggactcttccttttctgggattctttgaacctttagtttcttttctttctttctttctttttttttttaagtctccctctgtcacccaggttggcaccatctcggctcactgcaacctcttcctcccaggttcaagcgattctcccacctcagcctctcaagtagctggcattacaggtgcttgccaagacgcccggctaattttggtaatttttgtagaaacagggttttactatgttggccaggctggtcttgaactcctgacctcaagtgatcagcccgcctcggcctcccaaagtgctgggattagagacatgcgccattgtgcctgacctgaacctttagtttctaacagaaaaagcaaaaagctaattcatgaatctatctgtttgctcagttaattagacaactatttactatctattaagcaccaggcgctgtcctagtactgaggatatagccctcatggtgctgccattctagacagggacatctcatctagaatgtgtccacctagagatcattagcaaggacctgtgagagggaaggatccaacagaaagagccctgagaaagcctgtaaggatagttactgtttttaaaataatgagttctttttgcttatgggctcctgttgtttattggtccatttcaaagaagagtgtgctaagtccaagtatttgataaacaaagaatttaggtatgtaaggagttttccaaaatatccttcttaagaatttattttatttatttattttttttgagacagtcttgctctgttgccccaggctggagtgcagtggtgcgatcttggctcactgcaacctccgcctacctggttcaagcaattctccctgcctcagcctctcaagtagctgggattacaggcacctgttaccatgcccgactaatttttttttttttttttgagacggagtctcactttgttgcccaggctggagtgcagtggcgcaatcttggttcactgcaagctccgcctcccaggttcaagccattcttctgcttcagcctcctgagtagctgggattacaggcgcccgccaccatgcccagctaattttttgtatttttagtagaaatggtgtttcaccgtgttagccaggatggtctggatctcctgaccacatgatcctcccgcctcggcctcccaaagtgctgggattacaggcgtgagccaccacacctggcctaatttttgtatttttagtagagacggggtttcaccatgttggccaggctggtcttgaactcctgacctcaggtgatctgcccgcctcggcctcccaaagtgctgggattacagacgtgagtcactgtgcctggcttcaaaatatacatgtttaaaaatcacttttagaaggaacagcaatggttgccaaaaagtccagtgggggagtagggcaggaacacattgtttcactctccgtttcttcttctgatccttaaaaatgactttgccctttactaaaaacaagccatcttctttctcctgctacactgagttcacaattttcaggaggtttttatgaccagaaaatgtattcctagcttcacaaaggtttctactgctactctaacactgctttgctgccaaggtctgcagcaatgccattgccaccacgtggtactcgtgagtagttacatcactgatcaaaccctagccaaagtcttgcctcagtcaacctggaatgaaagcacatagatatctgaccaaaatgcttcacaggctgtattagtcactactgtcacaaccatcacatctaacctctacgtggccattacataaatcagaaaaagtagtggggtaattattaatagataactttcctttgggtttcccaaaggaattattttttataacttagacaaattccccagcaggtaagtggccaaatacattagggagaataaaaccaataggtttctaagacttcttgattctaattctgaagtgctccttcaattagctctagccttctacttctactatgctgctctgatctctacttttaatacagctacattactgtagaagttccctaaaagccttgtttatcatgtctttttcttccataaagacccttagtgctccatcctggccatcacagtgaaacactggctgaggcagaagaatcacttgaacccaggtggcggaagtgcagtgagctgagatcgtgccacggcactccagcctgggcaacagagcaaaactctgtctcaaaaaaaaaaagaaaagaaaaaaacccttagtggtataccactgctgatttatactttttgaacactatataattgttagtcattactgccattaggataaaattcctcaacatagcattcaaaaggccctttataccctggtattatctctcatttctcccaacacccctcacacaagttgttttcctataacacatgacaactttacgtttcctgggaattccatgactctgtacctttaccttacttgctgccactcctctttttccacttggaaaaattctcatctttcaaggcctagtttgaatgtctccttaagtccccaccaggaggagttgtgaaatatgagaagtaagggcaagtgggcagaatgtggctaattctaataagactcctgaaatgtgcagcagagcagccggaactggtctggagggaagcagagtgtatatctgacccttgtttgttcacattcattacatataaatatatatataaaaccttcccataaaacatgtgtatttaatgagttaaaactatttctaatgttcctactactacataataagcctaatccagatacaagctgaagtcttagcacaaatagtggctttatcatgctagttttgtcgacatgttgtgaatattttcaaatatacagaaaacttgaagcaactttgcaatgagtgtttatatatctactacttagaatctataattaacatttcctatatttattttatcacatacatacacacacacacacacacacacacacacacacacacacagaagtccccaccaataatccatctcctatcgggaacagatgatctctcactacttgatttacattgctaatgcattagtatacccaaatggaacacatgaccttgataggaggaagcttcccttaatcatatttgtctccctaatgcctagcagacagtaagcactcagcaagtgtttattaatgagaagataaattaataaataagtatagttaatcagtcttctgtaaaaacaaacaaaaacccagatatcaatgataccaaattaggaattctctatcatctatatactttttctcggttcagtacaaaaagggaaaaaaaaatcccacttcaatagtttttcctgcctgtgctactttagacgtaagacagcctgaaatctgacttcaacggttttgggtagatgcttagtaaaaacacgttgcaaaatgaatcctgaacaaatagacacatctctgggaataagattagaaatacagaaaaacaaggacattgtatattgaatgtcaaatataatacagtatggctaaggcagatgtaatcagaaattgcaaccttaaactttaaaacacaatggacagaattagatgatgggtatattgacagagtcccaaacccacattcaaaaaggatcataggaattgcaaagagagaaaaggcctcctaaatcttttcatcaatttagttgccatggcaatcctgaagaagtggagaatactggtgacagctcagatacagagtggggagtcatctcaaaggtttcttgacaactccaaggggcttcaggtctagagggatttgctctgtacagagaatgggcagtagaagataagccttctctaattgtagttctcatagcaatgcaagatttagattttaaaactggatatcacccagtgttggcaaggtacaggaaaatgggaactatcatataccacaggggctggaagagcataaactggtttaatctttctaaaaaacaatttagtaacatgtatcaaacaccaaaatcctagtcccagtaatttagactaaggaaataatcagggatgtaggcaaatatttagctatcaggatgccactatagtgatgtacataatagcaaactgtgcctcttaccctgaaacctccaacattcagcaataggtcaaataaatcatgatacactggaaagatagaatcccatatagtaattaaaaatgaagtcacttaagaattttaacgacccaggctgagtgcggtggctcacgcctgtaaccccagcactttgggaggccgaggtgggtggatcacttgaggccaggagtttgagaccagcctggtcaacatggagaaaccctgtctctactaaaaatacaaagttagctgggcatggtggcacatgcctgtaatcccagctactcgggaggctgaggcaggagaatcgcatgaacccgggaggcagaggatgcggtgagccaaggtcacaccactgcactccagcctgggcaacaagagtgaaactccatctcagaaaaaaaaaaaaaaaaagaaaaaagaattttaatgatccagtaaaagctagattataatgcacagaattatctggatttcttgtttttgagacagggtctcaccatatcacccaggatggagtgcagtggcaccatcatggctcaccacggcctcaacttgctgggatcaagcaatcctaccccagccactcaagtagctgagactacaggtgtgcaccactaagcctcactaatttttttttttttcccagacaggggttgcccagaacagagtgcagtagcgtgatcacaactcactgcagccttgacctccggggctcaggcaatcttcctgcctcaccctcccaaagtgctgggattacaggtgtaagccactgtgcctagcttcctggatatattttaaagataaagtatatacaagcacccctgtgcacacacaggaatactaaaagaatatacaccaataaattgctaaccatttctggataacacaaattacaattaacttatcattttaatcattttaagtgtacagttcagtggcattattttcacactgttgtgttaccattgccactatctatctccagaactttttcatcatcccaaactgaaatctgcactcatcaaacagtaactccccatttccccctccccaagtccctagtaaccactattctaccttccatcctatgaatttatcttttttttttttttaactgctccttgtggagcaaggcttatctataggcaatgtacccagagtaaccaaatgtaactattctaggtatctcatataagtggaagcatataacatgtgtcctttggtgtccggtttatttcagttaacacaatgtcttcaaggttcgtccatggatgatttttgtttatctgtattttctaagttttctatgatgcacatatataactttataagaatatcaggcttttctcaacttcatctaatctgacttcagaaagttcataaaaaaacatcattcacttactagcagctaaaagggtatttaagatttaggtgggaaaaagaagccacagcaggatgaatcgagggggtctgaacagcttcattttaagaatgtgcctacggcaggtcagagaacataagcaaactgtctaagatcacatagcccagtacagaactctcaccaatattattgccagcaactgctgtgtgtgtattctgcatagaaccctgtgctgggaatacaaagaaccaacctaattattagaagttgtcaatttagtgggagataaataaatgaaaaaaataaactgagatgagcctgaatttttgcatgagaacttggaaaattttggtgccacttctacaaataaaaattaggaggccaggcctggtggctcacgcctgtaatctcagcactttgggaggctgagacgggtggattatttgaggtcaggagttcgagacgagcctggccaacatggtgaaaccctctctctactaaaaaaatacaaaaaaatgagctgggtgtggtggcagtcacctgtaatcccagctacttagaaggctgaagcacgaaaatcacttgatcctgaacctgggagctgaaggttgcagtgagccaaaattgtgccactgcattccagcctgggtgacagagcaaaactccatctcaaaaaaaaaaattaggagaaagagcctggttctatgatgaagatgatattcatttttagacgttgtgatacagaatgttttttctagactattctgcctttagtacataaacatttcatattacattatcaaatggtcatatatatggtaaagcttttatttatttcataggtgaccaaattattggccttgaccattaggtccagaaagtaaaattgtgtactttctttttttttttttttgagatggagtttcactcttgttgcccaggctggagagcagcagcatgatctcagctcactgcaacctccgcctcctgggttcaagtgattctcctgctttagcctcccatctttcttttttttaaagaaaaaagatgatttatgagcaattaaaaaaaaaataggccaggcgtggttgcacacacctgtaatcccagcattttgggaggctgaggtgggatcacttgagcccaggattttgagaccagcctgggcaacatagtgagatgttgtctctagtaaaaacttaaaaattagctggaggtgttggtgggcgcctgtggtcccagctactcgggaagctgaggtaggaggatcgcttgagcccaggaagtcaaagctacagtgaaccatgactgcactactccattccagcctgggtaacagagtaagagaccctgtgtcaaagaaaccaaaaagaaaaaaataactagattttaaaagggaaaaaaaaaaagaagaagagaaagaagtatccacaaaacagtgaaaggctagatggtctctattaggaagagaaccctatagtctccaacttggtaccaagaataaacaccaaaattgcgattgctggcaataatattggtgagagttctgtacctggctgtgtggccttaggcagtttgcttaccttctctgacctgcagtaggcatattcttaaaatggagctatgcagagtcccttgaatcatcctgctgtggctcctttttctcacctctcttgatacagtaagtgccgtcatgtttttgctataggggaaatgatgtgtttttgtttgtttgtttttgagatggagtctcactttgtcacccaggctggagtgcagtggtacaatcccagctcagtgcaacctccgcctcccaggttcaggcgattctcctgtctcagcctccagaatagctgggattacaaggcattggccaccacgcccagctaatttttgtatttttagtagatgtggggtttcaccatgttggccaggctggtctcaaacttctgacctgaggtgatccacccaccttggcctcccaaagtgctgggattagcaaatgggtttcgaaggtttagcttattcattaaaatcagtatttagtatgctacaatgagctaggcagtgtatgtgtaggctgtgtgtgcgcgtgtgcgtgtgtgtgaaataaaaggtagtatgagttccatcaaggtgcttacagtctaatttaaggagacaatgaaccacaaacaattgtgccattaattcaaagagatgatgtcagcaaacctaagaatgtgggatacatactactgaatgcaaaggacaccacacacacgcatgtgcacacacacacacgctttttacctgagtggttaaaatgtcactctgagaggatagccctgagcagtcttcagagacgcttgtttcactctcacacccagatgctgcttcaccttaaataacaaaaacagaggttcagatgtaaaagcagactataaacgctgcaacttgctgtgtctttttcttctcattggcaggactggatttactttcatgtcacacaaaatgattaaattccttgctttgggacacctggatttgcttttataaaatgaaaccagaagtaagtccaccagtaattaggatgttaaagctcattcagtcaaagatgacgtcctagctgtgtgaaggacttttttctatgaaaagcaccttaggaggaacatgtttcaagtttaagaagcagttcctttaactatacttggaaatttgtaaaatgtgctccccaaaagcataaacatttagctcacttctataaatagactggggcaaacacaaaaacctggttccaatacctaagtttgaatccatgctttgctcttcttgattattttcttccaagcccgttcctctttcttcatcatctgaaaccaattccttgtcactcagaccaactccctggctttcagactgatgcctcatttgtttggaagaaccaatcaagaaaggatcctgggtgtttgtatttgcagtcaagtcttccaattcactgcactgtgaagaaaacaagctagcagaacattttgtttcctcactaaggtgatgttcctgagatgcctttgccaatattacctggttactgcagtcatttaagctattcttcaatgataataaattctcctctgtgttcttagacagacactcggtagcaacggtgctatgcctagtagactgagaaggtatattgtttactttaccaaataacaagtgttggaagcagggaagctcttcatcctcactagataagttctcttctgaggactctaatttcttggcccctcttcggtaaccctgagccaaatgtgtatgggtgaaagggctaggactcctgctaagctctcctttctggacgcttttgctaaaaacagcagaactttccttaatgtcattttcagcaaaactagtatcttcctttatttcaccatcatctaacaggtcatcaggtgtctcagaacaaacctgagatgcatgactacttcccataggctgttctaagttatctgaaatcagatatggagagaaatctgtattaacagtctgaactacttcttcatattcttgcttttttatttcaggatgcttacaattacttccaggaagactttgtttatagacctcaggttgcaaaacccctaatctaagcatagcattcaattttggccctctgtttctacctagttctgcttgaatgttttcatcactggaacctatttcattaatactggagcccacttcattagtactggaacctacttcattaatattgcttgagctggcttctttaaaaacattttctctaatgttattacggctaattgtgctcactgtacttggaatgttctcatttcccatttctctttcaggtgacattgaatgttcctcaaagttttcctctagcagatttttcttacatttagttttaacaaatgacttgatgggaaaaagtggtggtatacgatatgggttttgtaaaagtccatgtttatttggagtaatgagtccagtttcgttgcctctgaactgagatgatagacaaaacctagagcctcctttgatactacatttggcattatcaactggcttatctttctgaccaaccacaggaaagcctgcagtgatattaactgtctgtacaggcttgatattagactcattctttccttgattttcttccttttgttcacattcaaaagtgacttttggactttgtttctttaaggacccagagtgggcagagaatgttgcacattcctcttctgcatttcctggatttgaaaacggagcaaatgactggcgctttgaaaccttgaatgtattctgcaaatactgagcatcaagttcactttcttccatttctatgcttgtttcccgactgtggttaacttcatgtcccaatggatacttaaagccttctgtgtcatttctattatctttggaacaaccatgaattagtcccttggggttttcaaatgctgcacactgactcacacatttatttggttctgtttttgccttccctagagtgctaacttccagtaacgagatactttcctgagtgccataatcagtaccaggtaccaatgaaatactgctactctctacagatctttcagtttgcaaaaccctttctccacttaacatgagatctttggggtcttcagcattattagacactttaactgtttctagtttctcttctttttcttctcttggaaggctaggattgacaaattctttaagttcactggtatttgaacacttagtaaaagaaccaggtgcatttgttaacttcagctctgggaaagtatcgctgtcatgtcttttacttgtctgttcatttggcttgttactcttcttggctccagttgcaggttctttaccttccatgagttgtaggtttctgctgtgcctgactggcatttggttgtacttttttttctttatctcttcactgctagaacaactatcaatttgcaattcagtacaattaggtgggcttagatttctactgactactagttcaagcgcatgaatatgcctggtagaagacttcctcctcagcctattctttttaggtgcttttgaattgtggatatttaattcgagttccatattgcttatactgctgcttataggttcagctttcgttttgaaagcagattctttttcgagtgattctattgggttaggatttttctcattctgaatagaatcaccttttgttttattctcatgaccactattagtaatattcatcacttgaccattctgctccgtttggttagttccctgatttatcatttcaggagtcttttgaactgccaaatctgctttcttgataaaatcctcaggatgaaggcctgatgtaggtctccttttacgctttaatttatttgtgaggggacgctcttgtattatctgtggctcagtaacaaatgctcctataattagattttcagttacatggcttaagttggggaggcttgccttcttccgataggttttcccaaatattttgtcttcaatattactctctactgatttggagtgaactctttcacttttacatattaaagcctcatgaggatcactggccagtaagtctattttctctgaagaaccagaatattcatctacctcatttagaacgtccaatacatcagctactttggcatttgattcagactccccatcatgtgagtcatcagaacctaacagttcatcacttctggaaaaccactcattaactttctgaatgctgctatttagtgttatccaaggaacatcttcagtatctctaggattctctgagcatggcagtttctgcttattccattcttttctctcacacaggggatcagcattcagatctacctttttttctgtgctgggagtccgcctatcattacatgtttccttacttccagcccatctgttatgttggctccttgctaagccaggctgtttgcttttattacagaattcagccttttctacattcattctgtctttagtgagtaataaactgctgttctcatgctgtaatgagctggcatgagtatttgtgccacatggctccacatgcaagtttgaaacagaactaccctgatacttttctggatgcctctcagctgcacgcttctcagtggtgttcaaatcattattactgggttgatgatgttcagtatttgttacatccgtctcagaaaattcacaagcagctgaaaatatacaaaaataacaaggtactcaaaaactgaattgtcattaaaaaaatacatacttcatacaccttggaggtggaaatcaaccaactggctatattagagaaactaacctcataaactaccaagtatactgaagatgtagctcatactctttcatttaattcctatttacctagattatttccacttaggatccattaaatttttaatttcagaattttccctatgcagaaaccacacctatttctctaacgtctaagagtgaattaaaagcagattggccatcagaaaactggttctgatgtactctaaagattactggccattaagtctacttaatactctgttctatctacagacttaccactccctatatttaaaaaccagtaggtaaaagatgaaacacaaatacaccaattaaaagtaaagggcaggccaggcacagtggctcaagcctgtaactgcagcactttgggaggctgaagtgggcagactgcttgagtccaggagtttgagaccagcctcggtaacatggtgaaaccccatctctataaaaccacaaaaaattaaccgggtgtggtggcatgcgcctgtagtcccagctactcaggaggctgaagtgggaggatagcttgagccttggaggtggaggttgcagtgagccaagattgcatcactgcactccagcctgggcaacagagtgagaccccatctcaaaaaaaaacaaacaaacaaacaaaaaaaaaaacgaaagggcaacaatcagttacagaaggtcttattataggtacattagtctagtaccatttaaatctatcagaccataccacgacatttgacagagaatgatactctaactctgccaagagattttgtgggttgtaaaggtcccaaatggtcttcagaataatctaattacagtactgtatctacccactctcttttcagtgcctgttaagttggcaaactttgccattacccttttttgcagaatccaaactgatttcatccctggttccttgaggggtgatttgtaacaattcttgatctcccacactatagggaaaagacagagtcctaataagaaacactagttacatgtatgcagaactgtcaaatgaccaagatcaaacattttagctctttcgattacagaaagctgaccaatcttatttagttagtgaaagctgctctctcctttagaaacttctagttgaaatgaaatggttgctgggcacggtggctcaagcctgtaattccagcactttgggaggctgaggcgggtggaccacttgaggtcatgagttcaagaccagcctggccaacatggtgaaaccccatctctactaaaaatacaaaaattagccgggtgtggtggcgcgcgcctgtagtcccagctactagagaggctgaggcaggagtatggcttcaacctgggaggcagacgttgcggagaggtgagatcacacctctgtactccagcctgggcaacagagcaagactctgtctcaaaaaaaaaaaaaaaaaagagagaaagaaagaaatggaatggtcaattaaccgggcgtggtggtgtatacctgtagtcccagctactcgtgagattgagacaggagaatcgcttgaaccagggagttggagattgcagtgagccgagatggcgccactacactccatcctggcaacagggcaagaccccgtctccaaaaaaaaaaaaaaaaaaacctgggtcaagcaataattcctaaggaaggtaggtaacatagttggggttgcttgtagtttattatataacatacagacaaagcttgagagatatgtggaaataaggaacagaggaaagaaagagttgaaaatgaagtccttgaacattttcatcagtcacaattactgctgtgtcaatattactgtatatgaggaacttagagaacaatctgctagaagcaagcatgtgcagagttctactgttatcctaaattcctttggacagtgctaataactaaatccaacaaacaaaaagggtatttcctccactataaaatgagagaactaaactagatgatctctaaggtttcttccaataccatgattctagtctggagaaacaccagcctacttgagggaggaaggtgggaagagggagaaattcagaaagaaagcaaacaaaaaactgtggggtatgcttagtacccggatgatgaaaaaaatctatacaccaaatcccaagtcgtgtgtttacctatataacaaactgcacatacatccctgaacctaaaataaaagttaaaatatttttaaaaagagagaaacatcaatccttaatattaactaaataggaaaataccagcttcatagacaaaggttctctttgactcacctgcaataagttgccttattaacggtatcttcagaagaatcagatcctaaaaaatttccccccaaaaaataaatcaataaaagttttcttaattaaaagggttaaaaaaatgtacttgttgaaaaacagatattcaactagaaatatttactgagcatctactgtggcaggtacaatgctagttaagctagtatgtaatacagagaagtggttaaaggcatgggcttcgccaggcacagtggctctcacctgtaatcccagcacttgaggaggccgagatgggtggattatttgaggttaggagttcaagaccagcctggccaacaaagtgagacccccgtttctactgaaaacaaaaacaaaaacaaaaaaaaagcacaggctctgacatctaacttcctaggtttgaatcatggctcagccacttactaggtttaataccttggaaaaatttcataacttctctgtgccttaattttctcatctgtaaaataagtataataggaacaatctcagaggtctgacaagcatctaatgagttatacaagaaaagcacaatagtgcctggaatatagttaagtgctcctaaatatcaactactataactatttttacaatgcctgttgtctaggaatttatgatcataaggggggaaaacagtaagtgttatgataaatagatggtggtgcctgggagctcaaaagatggctatcctttttaattataaatatattctaaaagaaaatccaatttgagagcccagtttgaattctgagctcagcagctcttttttttttttttttggaggtcttgctctgtcacccaggttggagtgcagtggcatgatcatagctcactacagcctcaaactcctgggttcaatgtatccactcacctctgcctcctgagtagctgggactacagatgcacaccaccacacccagctaatttaaaaaagaaatttttttgtagagatgaggtcttgctatgttgcccaggctggtctcaaactcctggcttcaagcaatcctctgccactgctgagattacagatgtgagctactatgctggcctcaacttttctttttataagcttaaaaaaatttattatttttaaaaattattatttttttgagatgcagtctcactctattgcccaggctggagtgcagtggtgtagtgttggctcattgtaacctccgcctccctggttcaagcgattctcctgcctcagcctcccaagtagctgggattacaagcatgtgctaccacacccagctaatttttttttttttttgtatttttagtaaagaggggtttcaccaggttatccaggctggtctcgaactctgacctcaggtgatctacctgcctcagcctcccaaagtattgggattacaggcatgagccaccgcaccggccaaaaatgtattattattttaaaaatagagacagggttcccctatgttggccaggctggtcttaaactcgtggactcaaccaatccttctgcctcggtcttccaaagcgttaggattacaggcacgagccatcctgcccagccaagattcagctctttttttttttttttgagatggagtttcactcttgttgcctaggctggagtgcaatggtgcgatcttggctcactgcaacctctgcttcctgggttcaagcgattctcctgcctcagcctcctgagtagctgggattacaggcataagccaccaccccggctaatttttttttttttttttttagtagagatggggtttctccatgttggtcaggctggtcttgaactcccgacctcaggtgatccgcccacctcggcctcccaaagtgctgggattacaggcgtgagccactgcgcctggcaattcagctcttcttaaaaggcttcctcatctagtacaatttatcttggaactaaatactgtagcaatccatcatgttttttcttattgctactctccatctttccaaaacatatttacacatatttaaaaccagatattctttcttttgctctcttttttttttttagatggagtttcgctatttttgcccaggctggagtgcaatggtgcgatctcggttcaccgcaacctccacctcccgggttcaagtgattctcctgcctcagcctcccgagtagctgggattacagttatgtgccaccacacctggctaattttttattttttggtacagacagagtttctccatgttggctaggctggtctcgaactcccgacctcaggtgatccacccactttggcctcccaaagtgctgggattacaggtgtgagccaccatgcctggcctcttttgctccctttttaaagtaagattcttcaaggtgggaactgcgtcttttacattttttataactcaccatagggctcataaaattcacttcccaaagctgcctaccacaaatacaaattatgaccaagatttttggcaaaactataagataaggaatccagcaattattattaaatacttaaaaaacctgagacccttacccaattcaatgtagacagacgtcttttgaggttgtatccgctgctttgtcctcagagttctcacagttccaaggttagagagttggacactgagactggtttcctgctaaacagtatggtaaagaacagtcaagcaattgttggccagttctgtgcttttcctcctgaagagaaacttgacaccatggacaaaataaattgaccatcatcagtcagctaacatgtatgatgcctggaaaaaatgcccaggaatttacacactaaaatgtctggggctgggagcggtagctcatgcctataatcccagcactttgggaggctggagcaggactgcttgaggccaggagttcaagaccagcataagcaacagagtgagacccagtctctacaaaataatagtagtagtaataataaaatgtgtgggatatgtgtgatttgaatttttttttctgttgtcttaaatttttcaaacctgattatgtattatttgtgtaatttttgaagtattaatatagcatattttgaagctgatacttgatatacattccaatcacatctgataacttttttttttgttttggggggtgtacagagtcctgctctgtcacccaggctggagtgcagtggcgcaatctcagctcactgcaacctccgcctcctaagttcaagagattctcctgcctcagcctcctgagtagctgggtctacaagcgtgtgcaactatgcctggctaatttgtgtgtgtgtgtgtatatatatatacatatatatgtgtgtgtgtgtgtatatatatatataacatatatataacatatatatattatatatatataacatatatataacatatatatatgttatatatatataacatatatataacatatatatatatatatatataatatatatatatatatatatatatgtaatcccagcactttgggatatatgtgtatatatgttttttttttttgagacagaatcttgctctgttgccaggctagagtgcagtggcgtgatctcggcacactgcaacctccacctccctggttcagttgattctcctgcctcagcctcccgagtagctgggactacaggcgtacaccaccacgcctagttaatttttgtatttttagtagagacaggtttcgccatgttggccaggctggtctcacactcctgacctcaggtgatctgcctgcctcggcctcccaaagtgctgggattacagccatgagccaccgtgcctggccaataacatttttaaaaaggataaatgatgacaataaaaccccagcactcctaagaacatttagtataggaacgagtatttaaaagcccaacattactttttttttccttcctttttagctctatatcttttgaaaaatgaatgctggtactgtgagaactacttttattttatttgtatttttttagacagagtcttgttctgttgcccaggctggagcgtggtggcgtgatctcggttcactgcaacctctgtctcctgggttcaagtgatcctcccacctcagcctcccaaggagctgggactacatgcgcacgccaccatgcctggctaatttttgtattttttgtagcgatggggtttcaccacattgcctaggctggtcttgaactctaggactcgagatccacccgccttggcctcccaaagtgctgggattacaggcaagagccactgcgcccagctagaacaattacttttttttcttttttgagacagagtctcactctacggcccaggctggagtgcagtggcgcgatcttggctcgctgcaacctccgcgtcctaggttcaagcaattcttgtgcctccgcctcccgagtagctgggattacaggtacgtgccaccacacccagctaatttttgtatttttagtagagatgggtttcaccatgttggccaggctggtctcaaactcctgacctcaaattatctgcctgcctcagcctcccgaagtgctgggattacaggtgcaagctactacgcccagccccagaatgattactttttaagatctccatcattcatgcacatataagtaacaacagagcaaatcactacattttctttaacaattacaccttttaagttcaagtaattttccctttttttaaaagatagggtctcagtcacctgcgctggagtccagtggcacagtcatagctcaactgcagccttgactctctatgttaaagcaatgctccagcctcagcctcccaagtagctaggaccacaggtgcataccaccacgcccagctaagtttttttgttttttttttgagacagagtctcactctgtcgcccaggctggatcgcagtggcgggatctcggctcactgcaagctccacctcccgggttcatgctattctcctgcctcagcctcccgagtagctgggactacaggagtccgccatcacgctcagctaatttttctgtgtttttagtagagacgggctttcaccatgtgagccaggatagtcttgatctccacacctcgtgatccacttgactcggcctcccaaagtgctgggattacaggcgtgaagcttttttttttttttttttgagacggagtctcgctctgtcgccaggctggagtgcagtggcgcaatctcggctcactgcaacctccgactctcaggttcaagtgattctccatcctcagcctctggagtagctgggattacaggcacgtgccaccacacccagctaatttttgtatttttagtagagaccgggtttcaccatgttggccagggtggtctcaatctcctgacctcatgatccactggcctcagcctcccaaggtgctgggattgcaggtgttagccgccgcacccagccagttctttttttttttgcaactagatcttgctttgccgcccacgctgaagtgcagtggagtgatcatagctcactgtagtctacatctcctggactcaagtgatccttctgtctcagcttcccaagtagctgggactacaggcacacaccaccatgcccagataatttaaaaaaacttttaatatagacaaggacttgctatgttgcccaaactggtcttgaactcctgagctcaggcaatcctcaagcctcctagtgctggaattacaggcgtgagccacggcacccagctacttttttttttttttaattgcagagacagtgtctcactgtgttgcccaagctgggctcaaaggacctcctacctcagcctcccaaagggttgggattataggcatgagccatggcacccagctgaagtaatttccaaatgcttaaaaatatcagtgaccttatggctattttagataagcatcacagagcagataaagctccaaagcaaggaagggcctataagagctctcttttttggccgggcttggtggctcacgcctgtaatcccagcactctgggaggccaaggagggtggatcacctgaggtcaggagttcgagaccagcctgaccaatatggtgaaaccccgactctactaaaattacaaaaattagccaggtctggtgtcgtacccctgtagtcccaactactcaggaggctgaggcaggagaatcacttgaacctgggaggcggaggttgcagtgagctgacatcgtgtcactgcgctccagcctgggcgacagagcgagactctgtctcaaaaaaaaaaaaaaaaaagaaatctgtctttttggtgtatctgatggggatcttgctatgttgcctgggctggtctcaaacctggactcaagtgatcctcccatttcagcctcctaagtagctgggattataggtacattcacctcacctggctgtaaggtctctctcttgattatatcaggtaccctgaccttctctgaactctaactgattagaacacttgtctaaccacttaatataccatctttccttcttcactaactttttatataaatctatgagcatctagcacattcactaacatattcacaatgctcaataaagagatgttgccagaataaatgaaaatggttttaccggccgggcacagtggctcacacctgtaatcccagcaatttggggagccgaggtgggtggatcacctgaggttaggagttcgagaccagcctggccaacatgatgaaaccccgtctctactaaaaatacaaaaattagcctggcatggtggcgcgtgcctgtaatcccagctactaagggggctaaggcaggaggactgcttctagcctgggccacagagcaagactccatctcaaaaaaaaaaaagaaaaaaaaaagaaaagaagaagaagaagaagaagaaaacaaatggttttaccaaggaaggattttcgggttcactctgtagaagtcttttggcacggtttctgtagcccatactttggatgatagaaacttcatcttttagatgttcaggagagttattttccttttttgcaaaattatagctgtttgcatctgtaaaatacaagggaaaacattatgtttgcagttagagaaaaatgtatgaattataatcaaagaaaccaagagaaaccctatgtatgctctttgttgtgttaagacaatgcattaaggttacctgtgattttttttaaaaatcaaattttaaaaaatcaactggaaattttactcctaggaaacaaaaacaaatacacagaccatcaaagttatttagagtccttgttttctaccttaacactaagaaatttgcctatcaatactgtatttcactaaagctaagacaccaacaatgtaagttgcactattattttctgtatcactaagaaagaaagcacacaaattaaacaaatgacacaccctcaatagtaaaatgttcccaatttcagagatgttaagatgtgaaaaatgtgcaccttacgattgataaaataaggtgtgagaccagtgggagtaattttttaaaaatagattacagatacagaactaaaattaacctagactaaaaggtcttatcaccacgtcatagaaagtaattgtgcaaacttcctgagttttcatggacagcacttgagtgtcattcttgggatattcaacacttacactccaaacctgtgtcaagctgaaaagcacaaatgattttcaatagctcttcaacaagttgactaaatctcgtactttcttgtaggctcctgaaattaaattgtttgagaaacacactcagcaagtgattatcaaccttttaaggacactaaaataagaaaagacatgtaaacaaataaaaataagatgcagcaacagtagaaaacctctataatcaatacatcattgacatctgtataaaccgtgtgatggcagtgatttagtaactttttgtcattcatttaagcctaccaaatgcctaaaattatctgatataatactgccctaaatccacagcagatataatgcattgcatagaaaactagagtacttttttttttgtttaatttagagacagggtcttgctctattgcccaggctagcatgcagtgccacaatcatagctcactgcagcctcagacttctgtactcaagctatcctcccactatagcctcccaagtagctaggactatgggcatatgccaccatgtacatttatttatttattttgttggtagtgatggggtctcactatgttgcccaggctgatttcaaactcctggcctcaagcaatcatcccacctcagcctcctagagtgctagggttataggcatgagcaatcacaccctgctgagcttactgttcttaacatctgaaccctgcccaatccctcacttagttctgcctctcaaggatttctgtcaaattatgattatacttctttgaaaacacatagataacaatgtccaaagggagatttgggtttagtaaagtggaattaaagcacaattcattcattcctttaagcatctgagtgcctactatgtaccaaacttaggaaaaacagtgttgagacagacaaaattactactctcatagaatttacattgtagcagaagagatacacaatatataaatacattgtgtttgtgtaaataattagatagaaataaacacacacctgtgaaccccagcactttgggaggccgaggtgggcagatcacctgagctcaggagttaccagcctgggcaacatggtaaaacctcatctctacaaaaaatacaaaaattggccgggcatggtagcgtgtgcctgtagtcccagctatttgggaggctaaggcaggaagaggctgggagacagaggctacagtgagccgagatcacgccactgcactccagcctcagtgacagagcaggaccctgtcttaaaaaaaaaaaaaaaaagaaaaggaaacacaatcaaaaatataaaaacaagattaacagacaatgggggcacggcgatacagccctactttacataagtctgcaagtttttacactagaagcattagagaaaggcagtaagtttctaatacctgtataaggcagatgtcccataaaactttcaggaaaataactttggaaataatttactgtgtgctaaaaactcttttataaatttttctgatgaatggttttataggaacgctatgttattaaataatttctactttttcctactgtggttgcttccaacctagcatcattaccaaattatataccttttggttatatcattcttacataaaggacactgtgaaggccctttcttctggttgagaagtttcagcatgcaaaatctataaattataaagaaagaaagaacaatttaatttacttccttttgtagaaagaatactcaaaaggcaaatagccatgaaaagataatctcacaactgcccttaagagccatttaaaaagtaatggcaggtgaattacaagcaatagtttcctaattgtttttggatgctgcataagcaaaaacctaaactacataagcaatgatctatgaaaactgaacttacatgcatatggcttactgttatgatcacataaaacttaataaaagttaatatggcatatttaatgatatattcataattatttcatgctgcataatcaaatataaacggtaagtagttcatgtaagatgcttataattagtttaaaatctcaacacctcaccacaaagctatagtaatcaagaaagtgtggtaatagcataagaatagacacatacatcaataaaatggaattgacagtacagaaataaactcatacatacatctgtgatcaagcgattttcaacaataataaataccaagacaattttttttttttttttttttgagacggagtctcgctctgtctcccaggctggagtgcagtggcacgatctcggctcactgcaagctccacctcctgggttcacgccattctcctgcctcagcctcccgagcagctgggactacaggcgcccagcaccatgcccggctaatttttttatttttagtagagacggggtttcaccatgttagccaggatggtctccatctcctgacctcgtgatctgcccgcctctgcctcccaaagtgctgggattacaggtgtgagccaccatgcctggccgacgatttttattttcttaattttttttttttttttttgagacagactcactctatcacccaggctggagggtagtgacacaatctcagctcactacaacctccacctcctaggctcaagcaattctcgtgcctcagcctcccgagtagctgggattacagacatgcaccaccatacccagctaattttttgtatttttagtttcaccatgttggctagtcttgaactcctggcctcaaattgatccatctgccttggccttccagagtgctgggattacaggcatgagccaccgtgcccaggccaaagatgattaaatgggaaaataatactttttgtgtttttaacaaacagtgttgagacaaaagtataaccacatgtaaaagaatgaaattatactcctatctcacaccaaataacaaaagttaactcaaagtggatcatagaccagaagtagagagagcaatggtgatgataattaaaagcagcgattcactcatacaaccaatatttactatgtctagtactattctagatggaggggattcaatagaaaagcaaaataagatcctgcaaaataaaacataaaggacataatatactggtgaagggggtgactaggtagggagtaaatagcagacactgacaatgaagagacccaggaaagaaaagattaaggggctaaaaaaaaagtcactagggctgtgcacggtggtccacacctgtaatcccagcacttgcggggtgggtgaatcacttgaggccaggagttcaagaccagcctggccaacatggtgaaaccctgtctctactaaatattcaaaaattagctgggtgtggtggtggtgcactgtagtcccagttactcgggaggctgaggcatgagaataagttgaacctgtgaggcgggggttacagtgagccaatattgcaccattgcattccagcctgggcaacagagtgagattgtgccaaaaaaaaaaaaaaggcattgggaattgtgagaaaagacacttagagaatattttttactagccaggtaatttaacatttattaccctctcttggccgggtgcagtggctcatgtctgcaatcccaggaggctgaggcaggcagatcacttgaggcctggagtttgagaccagcctggctaacatggtgaaaccctgtctctactaaaaatacaacaaaattagccaggcgtggtgggcacacgcctgagtcccagctacttgggaggctgaggcatgagaatcactggaacccaggatggcagaggttgcaatgagctgagaagagtgccactgcactccaccctgggcaacagaggaagactctgtctcaaaaaaaaaaaaaaaaaaaaaaaaaaggccaggagcggtggctcacgcctgtaatcccaacactttgggagaggtcaggagttcaagaccagcctgaccaacacggagaaaccctgtctctactaaaaatacaaaaattagccgggcatggtggcatatgcctgtaatcctggctactcaggaggctgaggcaggagaatctcttgaacccgggaggcggaggttgcagtaaactgagatcgcgccattgcactccagcctgggcaacaagagcgaaactccatctcaaaaacaaaacaaaacaaaacaaaaaaaccccaactatatctatatctctatctatctacctacctatctatctgtctacagtcttgaactcccgacctcaagtgatcgcctgcttcagcctcccaaagtgctgggattacaggtgtgagccattgcgctgggctactttctatctttatttttgtacagatgtggtttcactatattgcccagtctggtctcgaactcctgacctcaagtgatcctcctgccttggcatcccaacgtgctgggattacaggcatgagccatcaagcctggccttatcttcatttttatagagtagaggcttgtcccagatcacacagtaattaagcaatgaaggttatattggatccagaattggattgtagcaaagcccacaatcttccttttttcttttttgacatggaaactaagtctggagagaggcacccacaatcttcctaccagagaaagtgaatgtaggtaggtaaggtcaaggagacttgggtccttcttcgccgatatagatgcttcaagtaccatattgcactcaacaaaacaatgactctatagtttggaagatgaggctgtcaaaaagctacctccactgtacataagtacctttaaaactcagaatagaggctcccactccttcagaatctacaaatactacatatactctagtataatggatcaagaaggcatcaagcattactccagcaaatagtacaattgaacaattcagagcaggggtagggaggaaattcccttatgatagtactgcagaatatagtacagtagagtgacaagctaagctgtctcgtgctgtagtctatacaattatataaataattcagtggaactagatacgcaaaaatcaaccaagataaggattcgaatctttttttttttttttagacggagtctcgctctgtctctcaggctggagtgcagtggcacaatctctgctcactgcaagctctgcctcctgggttcacgccattctcctgcctcagcctcctgagtagctgggactacaggtgcccgctaccacgcctggctaactttttgtaattttagtagaggcggggtttcaccatgttagccaggatggtctcgatctcctgacctcgtgatgtgcccatctcagcctcccaaagtgctgggattacaggcgtgagccaccgcacccggcctcgaatctttctttatgctagaaaaagaatacatgtataaaggttgttaactaaacttaaaagaaaatgaacttgtatatgacttgaaaagacagagctaactaaaatactggccaggcatgatgactcacacctgtaatcctagcactttgggatgcctaggtgggcagacgggttaagcccaaagttcaagaccagcctgggaaacatggcgaaaccccgtctctacagaaaacacaaaatttagctggatatggtggtgtgcacttacagtcccagctacttgggagactgaggtgataggatcgcttgagcctaggaggtcaaggcaacagtaagcctcatgatcgcaccactgtactccagctgggacaacagagtaagaccctgtctcaaaaaaaaaaaaaaaaagtagctgttgaaaaatttaagttacatttattgctcacattctatctctttgaacaatgtggttctagatcttcaaaaaagtattacaggctgggtgcggtggctcatgcctataatcccaccattttgggaggtggaggtgggcggatcacttgaggtcagctcaagaccagcttggtcaacatggtgaaacatggtctctactaaaataaaaggctgggcgtggtggctaatgcctgtaatctcagcactttgggaggctgaggtgggcggatcacctgaggtcaggagttcgagatcagccttgtcaacatggtgaaaccctgtctctactaaaaatacaaaaattagccatgcatggtggtgcacgcctgtaatcccagctacttgggaggctgaggcaggagaatcacttgaaccagagaggcagaggctgcagtgagccgagattgtaccactgcactccagcctgggcaacagaacaagactccatctcaaaaaaaaaaaaaaaagtattacacattgcatttttttgtttggaaagttcaaactaatgcatgactgccttaagaaatattttctagattggtattattatctttttttataggcttcataaaagatttcagaactggctgggcaaggtggctcatgcctgtaatcctggcactgtgggaggccaaggcgagcagatcacctgaggtcaggagttttggaccagcctggccaacatagtgaaaccccgtctctactaaaaatacaaaaattagccaggtgtggtggcacatgcctgtagtcccagctactcgggaggctgaggcaggagatttgcttgaacccaggagatggaggtggcagtgagctgagatcatgccactgcactccagtctgggcaacacagtgagactccgtctcaaaacaaaacaaaaaaaaacagccgggcgtggtggctcacacttgtaatcccagaacttagggaggccaaggcgggcagatcacgaggtcaggagatcgagaccatcctggctaacacggtgaaaccctttctctactaaaaatacaaaaaaattagctgggcgtggtggcaggcgtctgtagtcccagctacttgggaggctgaggcaggagaatggtgtgaacccgggaggtggagcttgcagtgagccgagactgcaccaccgcactccagcctgggcgacagagcgagactccgtctcaaaacaaaacaaacaaaaacaaacaaacaaacaaacaaaaataaaaaaaagatttcagaactttaggcttgcttgggtcaataaagttgttttatttttagcaattagagtttatccgtagaaaatacaattaatacaacaaaagcatgggggtatcgctcccaggctcccagctttctcatcatatagatcaaagtgttattcagattatattgatattacagaagagatttcatgaaaaagtcgatctatcacatgggcattatactggactttttttttttttgagacggaatcttgctctgtcgcccaggctagagtacagtggcacgatctcaactcactgcagcctctgcctcctgggttcaagaggttcctctgcctcagcctcctgagtagctgggactacaggcatgtgcccccatacccagctaatttttgtatttttagtagagatggtgttaccatattggccaggctggtctcgaactcctgacctcgtgatccgcccacctcagcctcccaaagtgctgggattacaggcgtgagccaccacacccggctttggacttttaattctaatataacattcaaaacacaatttaaaatatggctggcccatctctacaagaaacttaaaaattagctgggcaaatgccatgtacctgtagtcctagctacttgaggggctgagatgagagattgcttgaacccagattgcaaggtaaaagtgaactatgatcacaccactgaactccagcctgggtgtcagagggagacactgtctcaaagaaacaaacaaaaatatatatgtgtcacacacacacatatatataacatatttatatgtatacacacacatatatctttatgactggttctttcctgactatcacaatcctgactatcacaagcttgaaaccaagcttctcactcttctccagttgccaactctaatcctctcaatctcaacagctgttttttgttgttttttttttttgagacagttttcactcttgtcgcccaggctggagtgcaatggcgcaatctcggctcactgcaacctccgcctcccaggttcaagtgattctcctgcctcagcctcccaagtaactgggattacaggcatgcgcctccacgcccgtctaattttgtatttttagtagagatggggtttctctatgttggtcaggctggtcttgagctcctgacctcaggtgatccacctgccttgggctccaaaagtgctaggattagaggcgtgagccaccgtgcccggcctcaacagctgtctttacctccaacttcactgggctcaaagcacctcagcatcttcctgtagaattactctccttttccttcattactgtttatgagtaataatcaactctttcttacatcctttttctatttccaatcccttctgcctcctcttggaccttctctttcttgcaaatggcttcccatctttgagggcttcttccttttctaacacaactcctatacacatatgcaaagttagcttatttttcctggatgtattttcttttcttttcttttttttcagacagagtctcactctgttgtcaggctggagtgcattggcatgatctcggctcagggcaacctctgcctcccaggttcaagtgatacccctgccgcagcctaccaagtagctgggactacaggtacgtgccaccatgccaggctagttttttgtgtgttttagtagagacagtgtttcgccattttggccaggatggtcttaatttcctgacctcgtgatccgcccacctcgacctcccaaagtgctggtattataggcgtgagccaccgcgcccgtcctctattttcttttatttgtacatttgctcgtattattatctctgcctataagcctataatttccttcttccacaagttctcaaagcaactatattcataacttaatctctctttttttgttaagagacagggtcagccaggcgcggtggcttacacctgtaatcccaacactttttaaggccaaggtagctgaagtcaggagtttgagagcagcctggccaacatggtgaaaaccctgtctcgactaaaaatacaaaaattagctgggtgtggtggcagatgcctgtaatcccagctactcaagaggctgaggcaggagaatcgcttgaacccaggaggtggaggttgcagtgagccgagatcacaccactgcactccagcctgggcaatagagtgaaacaccatctcaaaaaaaaaaaaagacagggtctcactctgtcatctaggctggagtgcagtggtgtgatcatagctcactacagcttcgaactcctggccttaagtgatcttcctgccttggcctcccaaagtgctggggttatgggcaggagctaccacactgggcccttgagtccctgtaataatagtatagtatgttcagcatttgttactcaagctgacaagaaaacatacagttcattccagaaagattctcatccagataaattgaaagccccagggctttaaaggttaatctttagctctctgtagtaaatactgggacttttttttttttttttgagtctccctcttgtcgcccaggctggaatgcagtggcatgatcttagctcactcagatgaaaattatggactatcttcccagaaaaatgtacatggccatagttttgaatacaatttaaatataattctaggaaattcataaagactattcataaaccccaagttaagaactctggaatttaaaaattcctcaaaggatacataagaaattgatcattgtggttgtctggggagggaacagggaggcaggggttgtagggtaagagggaagtatactttgcatcatatacctttttgtgctaataaactttttaccaagtacatagtttgtacctggtaccaggttatgtaccaggtacataaatacttaaaaacaaattagttgacatttaaggtaagatgtgagccatagcttaacataaagaaaaggagaaagcccacttgttctactaaattacctactctactttttctgaaattcttttattaagaaacaaacattttcatttcaaaagacaagatcatcaaatacgtaaatataacttgaatcactgctataaatgaattttggcctaaatagaaactggtatcaggtcctttcctgtcttcacaatgattacaaagcgggcaaacactgacccttagaagggggaatgcataaggatatgcagaaatgaacagaaaggagaaactgggaaggctcaaacacaatgtgcttatttcaaaactgcttgcagtttgctttcactgatggacacaaaaaatacaaaacactgttcaaaatgatgttacatcctaatagataatatatgtcagtcgggtgtggtggctcacgcctgtaatcccagaactttgggaggccgaggcaggtggatcacaaggtcaggagttcgagaccagcctggccaatatggtgaaaccttatctctactaaaagtacaaaaattagccaagcatggtggcgggtgcctgtagtcccagctacctgggaggctgaggtagaagaatcgcttgaactcggggggcggaggttgcagtgagccaagatcatgccactgcactccagcctgggcgacagagcgagactttgtctcaaaaaaaaaaaaaaagataatatatgtcaaaactttaccaggaactatgattacaaccaacttttgataactatatactctctgagaaagaatgaaatggagttggatttttcgttctcacttaattgaagaaagtaaagcttctataaagttaggtgtttcctgggttatgaaggacaaaaacaaaagctaataatggagccacataacacattcaaacttacttgcaaaatatgtggtcacactttgtggagacaggttccttgatcaactccagactagcagggtagggggggagaaaaagaaaataaatgaggctcaataatttatttaaaaataaagctattcttagtgaataagttcaactttgagctgttatgactgagtcaacataaggcctcaagttcgttcaatatttattaaatgtctgctgtgtcaggaactgagaatacagcagagaatacgatccttaccttcagtgagctttcagatatcaaaacagaattatattgatcccttcaatactctatactatcatcagcatttaaaagattagttgataatagttcgtacgaattcatttccagtgatatatttttctgcactatcactgtgggtgcacatctcatctttaagctccataaagacaaaattttctgcttatatttcttttgaattccttcctagaacttttttttgtttactgtaaatgcctttttaacttaatatggaaaatttcaagtatttcaaaatttcaagtaaataaaataataaaatgaactatatggaccatcaccctggtccaacaaccatcaactcatggccaagctgtttcacccatatccacccctaccccagattattttaattattattacttttaagataaggtcacactctgtcacctaggctggagtgcagtggtgcaaacatacctcactgcagccttgaactcctgggctcaagcaatcctcccagcacggggtttacaggcatgagccaacacacccaaacccaagtgtcttcttttttttgagatggggttttgcttttgtagcccagactggcatgcaatggtgcgatctcggctcactgcaacctctgcctcccaagttcaagtgattctcctgcctcagcctcccaggtagttggaactacaggcgtgcgccaccacgcccggctgatttttcgtatttttagtagagttggggtttcaccatgttggccggctggtcttgaactcctgacctcaggtgatccgcctgccttggcctcccaaagtgctgggattacaggtgtgagccaccatgcccagccccaagtgtcttctgatctataggtgtctcttactttttctcccttgtcatttatttttaaaattaggtcatttgacctgtggagtttcccccattctggattttgctgattgtataaccctatggtgaggtttaacttgttcctctagccttatttcctataaactagacttacaggcttaatcattcaggttcaactttctggcaagaacactttacagatggtactgtgtactcttattagatcacttcagaagaggcatgatgtttggtttgtgattactttgtaaaaacagtgtaataagtactcactaaaggaaatttagaaaatgataagcttaaggccgggcatggtgcctcatgcctgtaatcctagcactttgggaggctgaggtgggtggatcacctgagctcaggagttccagatcatcctggacaatatggtgaaaccctgtctacgctaaaaatacaaaaattagccgggcgtggtggcgcatgcctgtggtctcagctactttggagactaaggtagaaggatcacttgaatcctggaggtggaggttgcagagtgagccaatatcgtgccactgcactccagcctaggtgacagaggaagactctgtctcaaaaaaaagaaaataaggccagacacgggggctcatgcttgtaatcccagcacttgggaggccgaggcgggcggatcatgaggtcaggatttcgagaccagcctggccaacacagtgaaacgctgtctctactaaaaataccaaaactaactgggcatggtggcatgcgcctgtaatcccagctacttgggaggctaaggcaggagaatcgcttgaaccggggaagtgcacgttgcagtgagccaagatcgcgccactgtactccaacctgggcgacagagctggactccatctcaaaataataataagcttaaaaataaaaacttcagaaaatacatcacccaagttcccatccctacctgtctatccacaaaaccaaggcattcctgagattagttcatttattatactaatataacaagtgtttattaagtatctactactatattcaagtactattctaggagatagaaatgtagcagtttacaaaataaagcctgctctcatagagctcatattctagtgtggtagacagttgatacggaattaaagaatacatgggaataagtgcattaaagagaaaaattaagcagggtaaggggaaacaggtagttcaatatctatgtgggggtgagatgtacatggggggagtcaggaaaggtttcactgaggtgagactagaggatagcttaataatgtaaagaaacacactatgcaacaattaggggaagagcattccaagaaagagggagcagagaaggcaaaccctgagcaggaccatgcctgtgtatgcaggacatcagataggtcaaggtgctaaaatgtaataatccaggaggatattgtagggaaagactatcagagaggtagctggtaacttctggtaggaacctataggctattttaaatctttagctttattctggtctttttaattttctttttttttttcagacagagtctcgttctgtcgcccaggctggagtgcagtggcaccatctcggctctctgtaacctccgcctcctgaattcaagtgattctcctgcctcagcctcccgagtagctgggactaaaggcatgcaccaccatgccttggcctcccaaagtactgggattacaggagtgagccaccatgccagccatctttttaatttttaatgttaattaatttttgtagagacaggatctcactatgatgcccatgctggtcttgaatgcctggcatcaagcaatcttcctgcttcggcttcccaaagtgctgggattacaggtgtgagctactatacccggcctttagctttcttctgaatgtgaacctttttttttttttttggagatggagtctcactcactctgctgctcaggctggagtgcagtggtgtggtcttggctcactgcaacctctgcctctcggattgaagtgattcttgtgcctcagcattccaagtagctgggactacaggcgcgtgctgccacacccggctaatttttttgtatttttggtagggaaggggtttcaccatattgcccaggctggtcttgaagtcctgacctcaagtgatccatctgcctcgaccgggattacaggcgtgagccactacacttagctctaaatgtgaatttttgaaacggattttttggataaagtccaggcaagatatcaaagaacgactaacctggcagtgtgacaagaatgtggttttttccttaaatatttaactttttagaaaaggatcacaagggccaggtgcggtggctcacgctgtaatcccagcattttgggaggccaaggcgggccagcctgggtgacagagaatccatctcaaaaaaagaaaaaaaaaaaagaaaaggatcacaagaaaagcttgtggacagtaaccttattgtgaagggttgtaatacaactcttgtaatcatggggtttttgacatagcacagggcagtgaaaagaaaaacaatgaactaagtcaggaggctgggtttctactaccagttgtgtatataagcagagccaccttgggctaaccactctacctgaacctgtttccttctcttgccattcaccctgccagactccttgggctattgcaagaataaaattaaatgctacttgggaaaatgcttcacaacctgagatgacttgggaaaaatgcttcacaacctgagataacttgtaccaacattggtattattactgggaccaaatgtgactttaaaaagaaaaacaaccttgacaaagaaaactctgattggttactaaatccctatttctgagataagctacatttcaaagaaattctccgtaaaagaaaaattggattcagttatcataccagatggctttcattctcaccactgactcaattctgaaacaattatatttcagtatggtaattataatctaaactatataaacacactgtaaacacaaactttgaacagatgaaaactccgatatgtaaaaaggtaatgaatgttgaaggaagactgtgaaaagggaaaagaaaaaaaattaaaatgttccccttctaggtcctgatgagagtaaatgtttactataaaaatgattcaaatattttaaacacttttcaaaccaggcaatattttaggcctactgtatatttgcattttgagcttccaatacggataagtgactggaaaaagcagctaggtttaggttgaaaaacaacaacccaccggggaacacattttagcaaattcttctgaaagtcaaaaatgttatagtcataggtaaaaagttacaaagaactaccaattgtcagaaatagctgccaatattgacttagaagacagcagaaggaattttagttcaagaaacctaaaacaggctgaaaaccttacctaccctatagctaccacaaataacactgtttccagtcatgatcattcctgatcacatattaagacataactgcaaattgtgctatactgtactatattaaaaggaagtgaaatatgatccctatcctagaactttccatacaaatgaatgtaaaacaccataaaaattaatcttaaggccgggcgcggtggctcacgcctgtaatcccagcactttgggaggccgaggtgggcggatcacgaggtcaggaagtggagaccatcctggctaacacggtgaaaccccgtctctactaaaaatacaaaaaattagccgggcgtggtggtggacgcctgtagtcccagctacttggggggccgaggcaggagaatggcgtgaacccgggaggcggagcttgcagtgagccgagatggcgccactgcactccggcctgggtgaaagagcgagactccgtctcaaaaacaaaacaaacaaaaattaatcttaagccaggcgcagtggctcacgccagcactttggaaggccgaggcgggtggatcacgagatcaggacttcaagaccagcctgaccaacgtgatgaaaccctatctctactaaaaatacaaaattagccggccacggtggcgtgcgcctataatcccagctactcaggaggctgaggcaggagaagcgcttgaacttgaacctggcaggcggaggttgcagtgagccaagatggcgccactgcactccagcctgggcgacagagccagactccaaccccccaccccgaaaaaaaaaggtccaggccgggcgcagtggctcaggactgtaatcccagcactttggaaggctgaggcgggtggatcacaaggtcaggagatcgagaccatcttggctaacatggtgaaaccccgtctctactaaaaatacaaaaaattagccgggcatagtggtgggcgcctgtagtcccagctactcgggaggctgaggcaggagaatggcctgaacccgggaggcggagctggcagtgagccaagatcgtgccactgcactccagcctaggcagcagagcgagaccgtgtctcaaaaaaacaaaacaaaacaaaacaaaaagtctgggagcggtggctcacgcctgtaatcccagcactttcggaggccaaggcaggaggatcacctgaggtcaggagttcgagaccaacctgaccaatatggagaaaccctgtctctactaaaaatacaaaattagctggtgtgatggcacatgcctgcaatcccaggtactccggaggctgaggcagcagaattgcttgaacccgggaggtggaggttgtagtgagccgagattgtgccactgcactccagcctgggcaacaagagccaaagtctgtctcaaaaaaaaaaaaaaaaaaaaaaaaagaaattaatcttaacaggaaacagaaaaaagcaatgaaaagctagaaaacataatagttgattgaaaataacaatttagcattttcattcttacatctttaatttttatgtatctgagtttttaattgatggtttaatttgccagaatgagaaagaacatcctatttttatgactctctcccatggaaatgaaacataaatgtatccaaatgccacactattgaggattttcctgatcactgattgtcatgagtaagttttgtgctttttcaaaagcagttttttcctacaatgtcatttcctgcttctctggctctgattttcaataaattgataaattgtgaatcctgttttcctcttatttttgtttagctataatgttgaagggcaagggagaggatggttatttataaatcttgtatcgctctgaaaacacaacatacattttccttaatctgattaacttgacttcaaatatgaaaaacaactttcataaagcagaaaagaatttacccttttttattgtgggtaagaggcaatggtacaacttttcaacttattttttgaatgttactcactactaaccatcaccatatttaaaaaaattaaagaactaatttagtttagtttattatttatttgacaaatgtttattgagtggcaactaggtcccaagtaccgttctaactactgaacatacagatgtatgtaaacaaaacaaaaatcccatcctggagtttacattctgtgggactagagataaaaaatggatacattacatagaatgtcagctagtaatcagtgttatggagaagcagcaggaatagaagataaagtgtgtgctgggggtgtggtaattttaaataggggtgtctggaaatgaaaaggtggtatttcaatcaagatttttagaccatggctgggtgcaatggctcaggcctgtaatcccagcaccttgagaggccaagggagggtagatcacttgaggtcaggagtttgagaccagcatggccaacatagcaaaaccctatctctacaacagaaaaatacaagaatggctggacgcagtggcttatgcctgtaatcctagcactttgggaggcccaggcgggtggatcacaaggtcaggagatcaagactatcctggctaacacggtgaaatcccgcctctactaaaaaagaaaaaaaaatacaaaaaattagccgggcgtggtagtgggtgcttgtagtcccagctattcaggaggctcaggcagaagaatggcatgaacccgggaggcagagtttgcagtgagctgagatcgcgccactgcactccagcctgggcaacagagcaagactccatctcaaaaaaagaaaaaaaaatacaaaaattagctgggcatggtggtgcacacctatcgtccctgctactctggaggctgaggtgggaggattgcttgagcctgacgaggttgaggctgcagtgagctgtgatagcaccactgcactccagcctctcgacagagatcctatataaaaaaaaaacctctgcatttcattgtatgtaaataagtatgtaatttcattgtatgtacagagccagtttcaaacaaaggttcttccaaatacctatcctctcaacgacaccgatcatccatgtttttttttttttttttttttttttgagatggagtttagctctgtcgctggagttcagtggtgccatattggctcacagcaacatctgcctcctggttcaagtgattctcctgcctcagcctcctgagtagctgggattacaggcacatgccactacgcccagctaatttttgtatttttagtggagagggggtttcaccatgttggccaggatggtctcgatctcctgacctcgtgatcctaccaccttggcctcccaaagtgctgggattacaggcataagccaccgccctcggcctcatccatgattttattttgccatttcaagtgatggagcttgttttagagctggaagaaaagccaaaatgccagttaatctaaactagattcctgccccagtgcagaaccaatcaagacagagtccctgtctttcccggaccacaggatttgtgttgaaaaggagaggagtgggagaggcagagtggatggagaacaaggaatcattttctatatttttaaagttcttcagttaagaaaatcagcaattacaatagcctaatcttactagacatgtcttttcttccctagtatgtaaggtcaattctgttcatttgcataggagataatcataggaatcccaaattaatacactcttgtgctgacttaccagatgggacactctaagattttctgcatagcattaatgacattttgtacttcttcaacgcgaagagcagataaatccatttctttctgttccaatgaactttaacacattagaaaaacatatatatatatctttttaaaaggtttataaaatgacaacttcattttatcattttaaaataaagtaaatttaagatttggaaggttttagaataatacaaaccaaagaactaatgacaacgtcctttatttttaaagattctagaagttgctttttgtaattagacaacataaattctgaattttttcacatattgctgccaaccccttgggtcttttcctttctccaagaaagagaaagctacagaggagtgactgaccgggtaggtggtggtagccttagctttctccaatgtttctggttgttttctttttcttgcataaaaccaaaatcaacaacgaccaaaccaacaccaatcaaggcctccccgcccctaacctttcccagtgacctgctctcatctctggatcctcctcaagcacatccctgccggcagcatctgttactactgacgctcctctacttccctcttgcgctttctcaatggcgcaaatggatccagttcttaagttctccctcccacaaaatcctgtctcctccccttcccagacatattcctggcacctcttcttccacaaggtcccatcctctcatacataccagccggtgttttttgttttgttttgttttgttttgttttgagacagtctcgctctgtcgcccaggctggagtgcaatggcgcgatctcggctcactgcaacctccgcctcccgggttctagcgattctcctgcctcagcctcctgagtagctggagcggcaccacgcccggctaatttttgtatttttagtagagacggagtttcaccacgttggtcaggctggtctggaactcctgacctcatgaccagccgacgtttttaaagacatagtgtccccctcaaggcatattccagttcctatcacgaggattcccccacggacactcagtgcccccttcctgatcctcagcgcttccctcgcgacctacaaactgcccccctccccagggttcacaacgccttacgcctctcaggttccgcccctaccccccgtcaaagaatacccatctgtcagcttcggaaatccactctcccacgccagtaccccagagcatcacttgggccccctgtccctttcccgggactctactacctttacccagagcagagggtgaaggcctcctgagcgcaggggcccagttatctgagaaaccccacagcctgtcccccgtccaggaagtctcagcgagctcacgccgcgcagtcgcagttttaatttatctgtaattcccgcgcttttccgttgccacggaaaccaaggggctaccgctaagcagcagcctctcagaatacgaaatcaaggtacaatcagaggatgggagggacagaaagagccaagcgtctctcggggctctggattggccacccagtctgcccccggatgacgtaaaaggaaagagacggaagaggaagaattctacctgagtttgccataaagtgcctgccctctagcctctactcttccagttgcggcttattgcatcacagtaattgctgtacgaaggtcagaatcgctacctattgtccaaagcagtcgtaagaagaggtcccaatcccccactctttccgccctaatggaggtctccagtttcggtaaatataagtaataaggattgttgggggggtggagggaaataattatttccagcatgcgttgcggaatgaaaggtcttcgccacagtgttccttagaaactgtagtcttatggagaggaacatccaataccagagcgggcacaattctcacggaaatccagtggatagattggagacctgtgcgcgcttgtacttgtcaacagttatggactggagtgttatgttttcgtattttgaaagcagaaactaggccttaaaaagatacgtacaactctttagggagactacaattcccatccagccccaggagtctggggcaagtagtcttgtaaggtcagtggcctgcggggacgcagtgagcgccgaatttgcctggggcaggggaaatgcgctctggcccatgtctgcgcactcgtagttccacccctcagccccagtgtttgttatttttcgggttcagcttgcttttgccccgtctccgtcgacgcaatcgccaccagtcaatggggtggtcgttttgagggacaagtggtaagagccaatcttcttggcgaaaacgcggagaaacgggactagttactgtctttgtccgccatgttagattcaccccacagagatagcggcagagctggcagcggacggtctttgcattgccgcctccccagggggcgggaagctggtaaggaagcagcctgggttagctaggggtggggtcacgtcacactaagagggtttggagaagttcaagggaggaatcctgcaaagaagaggggcgactttttccgtgtctccggacagctaatcgttttagtgacaggatgagagagcccttcgtgttctgagggaccgagtgggcgaaaagcgccggagagttggagagtctgtggttcagaatgcgaggtgacaacgtgctagcagccctcgctcgctctcggcgcctcctcggccttggcgtccattctggccgtgctggaggagcccttcagcccgccactgcgctgtgggggcccctctctgggctggccgaagccagagccggctccctctgcttgcggggaagtgtggagggagaggcgggtgtgggaactggggctgcgcgcagcgctcgccagccagcgcgagttccaggtgggcgcgggctcagcgggccccgcacccccggccccgggcagtcaggggcctagcacccgggccagcagctgcagagggtgcgccgggtcccccagcactgccggcccgcctgcaccccgcttgaattctcaccgggccccagccgccctgcacagggcaaggctcaggacctgcagcccgccatgcccgagccccctcccaacccctgtgagctccagcgtggcctgagcctccccgacgggcaccgccccctgctcctcagcgcccggtcccatcgactgcccaagggctgagaggagtgcaggcgcccggcacagccctgcgcaggatccactaggtgaagccagctgggctcctgagtcagatggggacttggaaaacttttatgtctagcctgaggattttatatgcaccagtcagcactctgtgtctagcttggggtttggggatgcaccaatcagcactctgtatctagctaatctggtgggcacttggagaacttctgtgtctagctaaaggattgtaaatgcaccaatcagtgctctgtgtctagctcaaggtttgcaaatgcaccaatcagcactctgtgtctagctaaaggtttgtaaacgcaccaatcagtgctctgtgtctagcaaatgtagtggggacttggagaatttttatgtctagctagaggattgtaaatgcaccaatcagcactctgtgtatatctagctcagggattgtaaatgcaccaatcagcaccctgtcaaaacggaccaattagctctctgtaaaatggaccaatcaacaggatgtgggtggggtcagataagggaataaaagcaggctgccccgctgggtgccagtggctcacacctgtaatcccagcaatttgggaggcctagaggggtggatcacgaggtcaagagatcgagaccatcctggctaacacagtgaaaccccgactctactaaaaagacaaaatattagctgggtgcggtggtgggtgcctgtaatcccctctactggggaggttgaggcaggagaatggcgtgaacccgggaggcggagcttgcagtgagcccagattgcaccactgcattccagcctgggtgacagagggagactccatctcaaaaaaaaaaaaaaaaaaaaaaaaaaatgcaggctgcctgagccagcagcagcaacccgctctggtctccttccacgctgtggaagctttgttcttgtgctctttgcaataaatcttgctgctgctcactctttgggtccgcatagcatttatctgctggtaacaccgaccgcagaggtctgcagcttcactcctgaagccagcgagaccacgaacccaccaggaggaatgaacaactccagacgggaggaacgaacaaactccagacatgccgccttaagagctgtaacactcaccgcaaaggtctgcagcttcactcctgaagccagcgagaccacgaatccaccagaaggaggtaactctgaacacgtccgaacatcagaaggaacaaactctggacacatcatctttaagaactgtaccactcaccgtgagggtccgcaacttcattcttgaagtcagtgagaccaagaacccaccaatttcggacacaagaacatccggcttctactgatggaaggccacgactcctcagtagaaagagggcccaggcaaagaaaatgagagagagtccttggggtggtgacactatcttgggaacatggagtgctaggaaacgataactggaagactaggatgaaatctgcaagttaaaaaatgacactacccatatatccttctcatcccattctccttttttcgagaccccgttaaagagatcttggttagggacctttggttttggaaaggcactgtttctcctttttgtcaaacactcaactttcaggccacactttttttttttttttcgagacaaagtctcgctttctcaaagaccagcccaggctggtcttgaactcctgagctcaagcgatcctcctgccttggcctcccaaagtgctgggattacaggcatgagccaccactcccggcctcagcttggataacttggcttgtacaggcctctggtggagacagtaaccaaagttcgggttgccaggtttgtttcattaaagggattttgttgaggctgaaagaaaaaaaaatcgatgtggaggaaaagctaacttgtgccaagacaaggtgagtcagtcacatggacttaacaataatgtcaattatgaaagctgaaggcctaggacccagctatctgactctactggctgtagacctaaggagcaggtagggttaaccatagctttcgtgtttacacacgttcaagattaatgctcttgctgaaagaatttttttacatgccagccaaagagagttccttatggagacctggatatggtccagctaagctagaatctcccacttcctgttttctcttagttggcccaccagctggaggagctccagaatatctaaattaatttccaattgtgtaatttgagaaaaagagacgaagattaatttccctaacgagtagggaagtgtgtttcttttttttcttttttttttgagactgagtctcgctctgtcgcccagcctgaagtgcagtggcacgatcgcggctagtgcactgcgaactctgtctcccgggttcacgccattctcctgcctcagcctcccgagtagctgggactacaggcacccgccatcacgcccagctaattttttgtgtttttagtagagatgggggtttcaccgcgttagccaggatgacctcgatctcctgacctcgtgatctgccttcctcggcctcccaaagtgctgggattataggcgtgagccaccgcacctggcaggaagtgtttcttaaagttggaaagtggtatttcagaatatccgcttttggcagactgagtcagtcacttcattttcctgattttttgcctaaggtcctggtgaattgacaaagattctgcccaaattttaacgaccccagtaattacatgtcatatgaatgaatacttgacgtcagcaggactgcgttttggtggtgaacttggttctaggtagaaacaaagaatggagaaaactgggggataattatcttagggtttcaaaaaagtgcctgatcttcacagacttcagggtccttaaaataacagtcttaattgtagtgttttacagggcagtgcattacattgtcaaaaacagtacaggtttatggttctaatgactggtttattatttttaaaaatgtttaattgaacttaatttttttaaggagacagggtccggctttgttgcccaggctggtcttcaactcctaggttcacgatccttccacctcagcctcccaaattgctaggattacaggcatgagccaccacaccgggccaattttttattttatttttgagacagagtctcgctctatcacccaggcgggagtgcagtggcatgatcttggcgcactgcaaccttgcctcccagattcaagcaattctcttgcctcagcctcttgagtagctgggaatacaggcctgcgccactacacccagctaatttttgtatttttattagagacgaagtttcaccatgttggctaggctggtctcgaactcctggactcaagcgatctgcctgcctctgcttcccaaaatcctgggattacagacatgagccactgtgcctggcctgtattataatatttttatatttgaatgacattttgaaagaacttgcatattcatttttaatttgatccttatggtaacactgtgagatcggcaaaacagacatattagacctattttacagattaaagaactgaagctcaaaggtgaactgacctgctcacagttttatgtctagtaatgggccagagctgtgtctagaacccaagtcttcccattttttgtgctcacacacatacacacaatttgctgttctgattagatgacatttcattgctttcaatttgcattgttctgaccaccagaaagtttgaaagtcttctgaggtatttgttaggtgttctgacttcttctatgaattttatgtatactttttcctgggttgttaattgtatcattagcagttttgctgatactctgggtgtgttgcagatattaaccctttgctgtgggttgtgatggttgtttgttgtcttctgattttgtggatttttttaaccatataaaatatttagtatgtaatgaaatatgcccaactcatcctttgacttctatgtacattataacctgcctttaaatgtgtatttcttttgtaggtaaaagtttcatttgatctgaatagtattaaaataaaatacctggatgaggaagatgaagaggtaaagtatattatggtacttattgctaggtgttcagaatagggatcttatttctccagtgatatgggctttaataattcgaagtagcgcttagctcatttgtgtctcaaaataataataataataataaaaacaatgagacatgcaagagatgtcgggagaagcaccagaagattccattgaaatcttgctccccagaagggtgggaacagtagggacagaaaactgctgtggttcattatgtttcatccccatttcgcttcattttattgaaccccgtctctactaaaaatacaaaaaattagccaaatgtggcagcaggcgcctgtagtcctagctacttgggaggctgaggcaggagaatggcgtgaacccaggaggcggagcttgcagtgagccgagatcgtgccactgcacttcagcctcggtgacagagcgagactccgtctcaaaaaaaaaaaaaggatatcagctttttattttcttttcttttctccttttctttctttgctttgcttttctttttgttttgggacagagtctcactctgtcatccaggctgcagtgcagtggcgcaatctcagctcactgcaacctctgcttcctgggttgaagcgattcttgtgcctcagcctcccaagtagctgggactacaggcatgcaccaccatgcctggctaatttttgtatatttggtagaaatggggtttcaccatgttggccaggctggttttgaactcctggcctcaagcaatccagcggcctcagcctcccaaagttatgggattacaggcatgagccattgtgcccagccaggatatcatcatatttaatcctcacatcaactgacatttgccccaatttacagatgaggaactgaggcacagagaggttttggtacttgcctgaggtcacacactctgggctctctgcttggggctgagggccaaggggggttgtgactgacttctctttcctgaacatcaataaaattcaatttagaaatttctgtcttcagtgctatctcgaggggcctgtgaaaaatgctgactcggtggcagctgtcttagccccatactcattgggttgccctgagccccacactgttttaaggaagtcccagcaaataatatgggatagaggtgagatccaaacctaagcagccctggctctaaaacccactgaacaaagctgcctctccaactagcatcagaaagaactaggtgagaatcctacttctatcacttactagttctgtggctctggccgcccccgcccaagttacttaacctctttttttttttttcctttttctttttctttttttagagacgaagtctcgctctgtcaccaggctggagtgcagtggcgtgatcttggctcactgcaacctctgcctccgggttcaagcaattctcctgcttcagcctcccgagtagcttgggactacagacgtgcgcaaccatgcccagctaattctttttttctttattttattttatttttttttttgagatggagtctcgctctgtcgcccaggctggagtgtagtggcgcgatcttggctcactgcaagctctgcctcccgggttcacgccattctcctgcctcagcttcctgagtagcttggactacaggcgcccaccagcacgcccagctaatttttttttttctttgtatttttagtagagacggggtttcactgtgttagccaggatggtctcgatcccctgacatcgtgatccgctgtcctcggtctcccaaagtgctgggattacaggcgtgagccaccgcacctggtcgattaacctcttttaagcctgttttctcatccatacaatggagataatggcagcacccactgcttggtaaggaatattaggtgaacacaggtgcctatgtgggttcctccattttccataaatgttaattcccttatccctcatctcctaggttagtcccagaggacagatttgaagtttgaaaacagaaagtaactgccaaaagggattatttagggcagagattgtccccttttattatgctttaggtcctcagtggtgagggcaggggacaggagaagtgggatccagcccaaattcttggatctcatcgtagagtgactctttaggggcttaggattctgcattttggacccgtccccagggcattctgatgcctgcagttctcctgtctggctttgaataactctgggtagtgctttaaatctaagctgacataccagtgggatgtgaactgtccttgcaaatgttttgagcccttcctgcgctggcctccaactctgccttgctcagtctgtctttagctcctttccattctggccttctccctttcctttttcacttcctttttttttttttttgagacaggatctcactctgttacccaggctggagtgcagtggcatgatcttcgctcactgcaagctccgcctcccgggttcaagcaattatcataccttagcctcctgagtagctgggactacaggcgcacaccaccacacccagctaatttttgtagttttagtagagatggggtttcaccatgttggccaggctggtctcaaactcctgacctcaagtgatccgcctgcctcggacactcaaagtgctaggattacaggcgtgagccaccacgcccagcctcctttttcacttcctaccttcctccccacctctgggtgtaccctcccctgagctcagcctgtatttctatctgctggccacttaccagccagtcctttcatctacaatgccctttactcacctagaaagctcacatcaaaagtcgcctcctccagaatacctctcaagttctcctctctggtcccttgaccctttgcaggtaccttttttcttgtacaagtcacatgataatgtaaggggtttttttccccatctagagcctgcctggtgggctcatggtccatttgtggaaacatgcatttccctctcctccgcccccctccttcatgatccatgctttaagagcttccccaaggcatgcagagcaagctgagaagaggtagacaagcctgcagacctttcaaagaagtggggtggcttgggaagtaaaagaagatctggagataggagttcctaaaaagcagacaagagattaccgaggggttccccacagctccagcacacagcagctgcaaaaaaaatgcagtggaattactgagggacattatgggcttgatggaggacagggaatgcttgtgccaagccaccaaggatcatgctgtggcagttgtgaccagatagactatacttttgccaaggtgaaaggatttccctactaaatcctttactttccactttgtttaaaatgagtttaacaccaagaaaatagttgtctctatgtccttatttctaatcttcctgctcaaccatgaactgcactaaacacactcagacccatctaacctaaaattgagaaagggaggttctcactcctggagagagaattactgaaagggcggccctcatacagttcagggtcatacccccaatagctggttttatatttgaaagcagacactgggactctgacctttgcagagataaaagggatactttcctaacccagagaggccaaaggagcacaggacgcccaggccgagggcagtgaagcttgcagacccaggctgtgcaacccccacagcaggtctcctcacgggatagatagactattggccccaattcctcagccctacatgcacccaccccttgccatggtttcgttgtgggtggagggtactttcccagcccctggctttgggcttgcccacgtgtcttgctctggccatggaatgaagcacaaaggagagcctgctagttcctaacccacgcctgaagacgccttaggcggttctgcggaccccgtgcacttccaccttcagccagaaggccttctctggtgcagccgttgcttcagcctcggtccaaaaggatcggagccccctggccgatccgcaggcctgcagggagccacagagcgcagcggccggcccagcgttcaagcccaagcacaggcctgcaagaactttcttccaactgccgtttgggatggttgattaggacgcgttgctgtggcggtagctcaccaatccaatgcatgcacccgctcctttattaggctatagggccagtggctgcgacagggacctgatacaacagtgcgttaaataaggagcttattgagctatcatgtcataagccggtggagaagtccaggcctagtgtagggtctctggccggggctgtagccttcatccgcgtggaaccttcccatggttcgcaggtcgcggtcttcggagccttcagcctcgtgagcccgaacagtccatagggcggcgccagaccctcttcccaacgccaccctctaaagcctcggctccaaccgattccacttctgcttcaggctcaggattttcactcttctcgaatgggggtggccctcccctgatcttctgaatcgcaacagcatctccctccctccaggacatcagagccagagctgggcgagaggccctgacctctggggtagggtggcagcgtccccttgaagatgcggtcccgcctcccatccccaggcgcccggcctctcacaccctcagcaccctgctcacctccagctgaagatgccagggcacctctgcttcctccctgctctctgcagtaccgcagagtgagcataaaagggcttaatacaggcttcgccgggcgcagggctcccgcctgtaattccagtactttgggagaccaaggcgggagggtcacttgagaacaggagttcaaaaccagcctgggcaacaaagtgaggcccgtctctaacaaagacaatgagaaataaatctaaaaattggatagactgaaacaggcaatgaggaaaggattccctatttaataaatggcattgggaaaactggctagccatatgcagaaaactgaaactggaccccttccttacaccttatacaaaaattaactcaaggtggattaaaaacttaaacataagatctaaaaccataaaaaccctaaaagaaaacctaggcaataccattcaggacataggcaggggcaaagacttcatgactaaaacaccaaaagcagtggcaacaaaagccaaaattgacaaatggaatctaattaaactaaagagcttctgcacagcaaaagaaactaccatcagagtgaacaggcaaccacagaatgggagaaaatttttacaatctacccatctgacaaagggctaatatccagaatctacaaagaacttaaacaaatttacaataaaaaatcaaacaaccccatcaaaaagtgggcaaaggatatgagcagacacttctcaaaagaagacatttatgcagccaacagacacatggaaaaatgctcatcatcactggccatcagagacatgcaaatcaaaaccacaatgagataccatctcacaccagttagaatgtcagtcattaaaaaggaaacaacaggtgctggagaggatgtggagaaataggaacgcttttacgccattggtgggactgtaaactagttcaaccattgtggaaaacagtgtggtgattcctcaaggatctagaactagaaataccatttgacccagcgatcccattactgggcatatatccaaaggattataaatcatgctgctataaagacaaatgcacacgtatgttcattgcggcactattcacaatagcaaagacttggaaccaacccaaatgtccatcaatgatagactggattaagaaaatgtggcacatatacaccataatatactatgcagtcctaaaaaatgatgagttcatgtcctttgtagggacatggatgaagctggaaaccatcattctgagcaaactatcgcaaggacagaaaaccaaacaccacatgttctcataggtgggaactgaacaatgaggacacttggacacagggtggggaacatcacacaccagagcctattgtggggtggggggaggggggagggatagcattaggagatatccttaatgtaaatgacgagttaacaggtgcagcacaccaacatgacacgtgtatacctatgtaacaaacctgcacgttgtgcacatgtaccctagaccttaaagtataataataattaaaaaaaaaaaaagaataaaagaggtccctttttctgggagattgatgtaggggagcgagcgtgtgagttggaagggaggcattgaggatcagccatttaaagcagcatacaaggatgttcaaggctcgagatccacaggtgtattttcagaacctgaatttcctggcggggcacagtggctcatgcctttaatcccagcactttgggaggtcaaggtgagcggatcacttgaggtcagttcaagaccagcctggctaacatggtgaaactgtttttacaaaaaaatataaaaattagccgggcatggtggtgagcacctgtattcccagctattcaggaggctgaggcaggagaatcatttgaacctggaaggcagaggttgcagtgaaccaagatcatgctactgcactccagcctgggtgacagagtaagaccatctccaaaacaaaacaaaacaaaaacccaaaataggccgggcgcggtgtctcgcacctgtaatcccagccctttgggaggctggggcgggtggatcacctgaggtcaggagtttgagaccagtctgaccagcatggtgaaaccctgtctctactaaaaatacaaaaattagccgggcatggtggtgcatgcctgtaattccagctactagggaggctgaggcagaattgcctgaacgcaggaggcagaggatgcagtgagctgagattgtgccattgcattccagactgggcaacaagagcgaaactccatctcaaaaggaaaaaaaagcaaaagagaaaaaacccaaacaaacaaaacccctgaacttccctgcgggcacattttctctggcagcctttttcaatgagagctatgttttctccgatactatatggcctgcggaccgctcagctttcattccagtgaaaacattccagaacaaactccaggtcggtcccaggtgtttctccaatcaactcagggcatggttgtgtgtcacctgctgcccagctagaatgacacctctccaggcctctgacttagctaggtctccaccatgtgactccaccgtagactccatgccttcttcttttgcaaagcctcggacacccaaacacctaccaaaagtgggtagggtgccaggacacctccaagtataagtagggctccccaccatgcctggatgtggagttgtgctgcagagtggtggctgctcatgacattcatttcacccctttctgtgcaggtgctggaagcccaggaagcacacatcaaggctcccttgccagcagggtgctgccaataaaaggtagtcacgtggaatttggaatgtggaaaggaggtagaagtcatcctttcctcccctgtagcagcaggcgtgcaggctctggtggtcagctggactccatactcccccaccagtcaccagcctggggaccgtggggctgcaaggacctcagcagcggtgtcccaagtttcctgacttcttccatcctctggaaatcagctgtggtaaagtagcctgaaagccagtggtacaaccccctccccacaaccttcaccacctctagcccctccaatgaaaagcactaattgcctatatacaacccctttttgtttgaaatatctagagtaatttctgttttcctatctggggtagtgtaacgtaagaagaaatatacatttggtctctgcccccggttcctaacacaaagctcctaaaacccttggaaattcctgaaagatgggggtgctaggagcattgtctttttttttttttaaatttatcatttttcttttctcccaggtgttttttccttttttttttttttaacttttattttagattaggggatacatgtgaacgtttgttatatagctaaacttgtgtcacatgggtttgttgtacagattatttcgtcacccaggcactaggcctaatacccgatagtttttttcttttttttttttgagatagagtctcgctctgttgcccaggctagaggcacgatctcggctcactgcaacttccgcctcccaggtttacgccattcttctgcctcagcctcctgagtagctgggactgcaggtgcctgccaccacgtccagctaattttttatgtttagtagagatggggtttcaccatcttggccaggctggtctcgaactcctgaccttgcgatccacccacctcggcctcccaaagtgctgggattacaggcgtgagccaccgtgcctggccagtacccagtagtttttttggctcctctccctcctcccacccttcaccctcaggtagggcccagtgtctgttgttcccttctttgtgtttatgagttctcatcatttagctcccacttataagtgagaacgtgtggtgtttggttttctgttcctttcttagtttgctgaggataatggcctcaagatccatctgtgttcctacaaaagagatgatcttgttcttttttatgattgcacatcttttgttctaacgtttggtccttcaccttggttcctgacacaaggattcctaaatcccttggaattttctgcatgataggagcgtcctttgttctcatgaggtgactcttggtgggctccttatttggggactggtcaccaaaaatacctaactatggttggaagcttagtgctttcagccccattccccatcctctggggtggggagcagagctggagctcgatcatgcctgcgtgacaaagcctccagaaaaatccttgaaagacaggacatggagagctgctgggttggcgaacacatccatgtgccgggaggatggtgcaccccaactccacaaggacccttccagacctcaccctgtgtatctcttcatctggctgttcatttgtatcctttaaaatatcctttgtaataaatcagcaatagtaagtaaactattttcctgggttttgtgagctgttctagcaaatggtcaaacctgaggagggagttgtggggacctccaatttatagccagttggtcagatgcataggtgatgcttggccttgcacctggggtctgacgtgagggcggtcctgtgtgactgagcccttaacctgtggagtctggtgctcactctgcttagggcttctctgcctttgtagtgtcctgtctagaaggcctttccttcctcttttctgctcagaaaacttttcttccacttcccttcttctaagccatcccttatatctactcctttccagccgaccaagagcagaaccacggctggctccactgccagcatgctgtcccacactgtctcctcaggatgtattcagatgtccggccctctccctagtctaggagccctttgaggaaagggatgctgtcctagtcaactctttcccagcgccaggcacaacgtctggcatgttccatctttttcatggactctccccaggcggcctgaccttccctcctctgaactgctgcatttcctgtctgcatcatgtttgccctaatcagacatcgccttatttcatcatcctttaaaaaatgctttatttctctggcagatttcattggaatcagaattttctttcatttagtagctgttggccttgtgtccacctttctgtggcactcaggtctcacttaagagctggccctctgagctatggtttgccgtcagtgagatggagacagaggcagccctaggcagtcatgttttgttccacctgaccctgggcacccctccccctcccaggctactggcagggatgggcaccggcctgggagagacagctcatccacaggctggcccagcagaaactctgggctcagacaaaactgctcaattgaggacaaactgggcaaaatagaatcttactttgggagtttttagaaatatggttggggtagcattggggaataataagaattgtagccaggcatggtggtgcatgcctgtagacccccagctactctggaggctgaggcaggaggatcttttgagccctagagcttgaggctgcagtgagctatgaatgcaccactgcactccaggctgggtgacacatcaagaccctgtctcaaaagaaaaatgtgcacatttgagatacataaaaaaattttttgttatataaaaaaaaattatcaccgggcacggtggctcacacctgtaatccagcactttgggaggctgaggcgggcggatcacgaggtcaggagatcgagaccatcttggttaacatggtgaaaccccatctctactaaaaacaaaaaattagccaggtgtggtgacgggcacctgtagtcccagctacttgggaggctgaggcaggagaatggcgtgaacctgggaggcggagcttgcagtgagccgagatcgcaccactgcactccaacctgggcgacagaccgaaaaaaaaaatttagcataaaaatgtgaaattatgtaaatatgccaaaataggaacctggaggtgcttggaatccagactttgggagcccagcagtgcaaggatctctactcttggcttctttttttcttgagatggagtcttgctctgttgcccaggctggtgtgcagtggcccagtctcggctcactgcaacctccgtctcctgggttcaagcaattctccctgcttcagcctcctgagtaactgggattacaggagcacatgaccatccccagctaatttttgtattttttagtagagacggggttttgccatgttggccaggctggtcttgaactcctgacctcaggtggtccacccacctcagcctcccaaagtgctggaattacaggcgtgagccactgtgcccagcctagtcttggcttcttgtcaactccctgcttatgtccaacactcacccctattacagagctggtgtgggggagtttctgtcctggtgacttaacagtgtaattaaagtgcttagcactgtacctgaccacagctggtgcccaacaaacagcagctgccatcattctcaccatccgtatgttattgttattgactcttcaatggcaaccatggcttatccccctttatctccctatgtcctacagccggacagaggaatggttacaaggctttgagcctaacagtgctggcttaaaaccgtaacttgtcgttttggatgtgtggccttggacacttgggcaggtcacctacgtccttctagccctgtatccttatctgtcagatgatgattttaaaaactatgcttccatggattgctgggctaaatcatataagactgtaaaatgcctaacccaggatttggcatcaagtaagcaaattgtaaatggtagctgctgttctgcctatgactatttagtcttgtgctttactttttatttaattatttttaagacagagtttcagtcttattgcccaggcaggagtgcaatggcgtgatcttggctcaccacaacctccacttcccaggttcaagtgattctcctacctcagcctcctgagtagctgggattacaggcatgtgccaccatgcccggctaatttttgtgtgtgtgtgtgtgtgtgtgtgtgtatatatatatgtgtgtgtgtgtgtgtatatatatgtgtgtatatatatatgtatatatgtatatatgtgtgcatatatatgtatatatgtgtgtatatatatgtatatatgtgtatatatatatgtatatatatgtgtgtgtgtatatttatttatttatttatttattttattttttttggtagacacgggtttctccatgttggttaggctggtcttgaactcccaacctcaggtgatccgcctgccttggcctcccaaaatgttgggattacaggcataaaccaccatgcccggcctagtcttgtgctttagactcaaatatttgttggcccactgaagtcaccacacagataaagacacttttcattctcagtaaggaactttgggagataattggggcaggcagctaaagaacaggtgtcttttgtctgacatcagcaaactcatggaaaccgatgggcggctcactttgcttagaacccccacagcacgcacacagggctgcttcccagtcacactgctcctgggatgggggtgctgctgttctgcagttagcactgttctttacttcctattactgaactgccagcgttcatttgtgttcagttaggtagattaccaattcttgttcattcagattttcttttgctcactaatgtgtttcatgttcactaacttaccaaatgtgatttattagtgactttttttttgaagatggagtggaggaatccttgcgccttctgcagcattctgctgccgttatggaacagtgcatctatggaagtgcatcagcgggggatggggagaggctagggcagtacacgtgaatggagaggtagccccaccagtatgttttctgaaatacagtcccgcagagggcagtcttgggaaattactgctctcacacactcttcttgaccctatccctccagcacctccctgctatccaaaggttgggatttttaaaaagaaaaataaattataaaaaaaaccaggccgggtgcggtggctcagtcctgtaatcccagcactttgggaggctgaggcgggcagatcacaaggtcaggagatcgagaccatcctggctaagatggtgaaaccctgtctctactaagaatacaaaaagaaattagctgggcatgctggcgggcgcctgtagtcccacctactcgggaggctgaggcaggagaatggcgtgaacctgggaggcggaggttgcagtgagccgagattgcaccactgcactccagcctgggtgacagagcgagactccatctcaataaaaaaaataaagtgaattttcctccatcttgtaagggcgaaaagccccctaccatgtctgaatgaacattcatgcatgggcttgagggcttgggaaaaagacagggcttggccacacagtgcaggtaggcccagtgatcctatgagaggggccaggaggtggtaggtcccctgtgggcaggaggtcaagtatgtggtattatacttgatgaaccaggggagagggcaccaagaacaacgatatttaattgtaaaatctccaccctctgaggatatgtttttaggtctggatgactaattagactgggaaacaaggcagggaaagatggccctgtgcttcctctgcctgctgcctttgtggatgcgtgggccgccagcttcagtcctgcttttctttctgatggcccttgttatttatgcataaatatttaactacacatttaaatgtcttactgcatggctagaattagttatatatattctttaatataagaaaaataagagcagctccgagggcaggcatggtggctcatgcctgtaatcccagcactttgggaggccgaggcaggtggttcatctaaggtctggagttcgagaccagcctggccaacatagcgagagcagctccggtggcgggaggagtggcagcggccaggcagcccagcttcgcgaaggctgtaggcacaccgcggccagcaggcacctggcacccaccttccctgctgccaggatgcccaagaaaaaggtcagctccaccgaaggggctgccatggaagagcccaagaggagatcagcgcaattgtcagctaaacctcctgcaaaagtggaagcgaagccgaaaaaggcagcagcgaaggataaattttcagacacaaaagtgcaaaaaaagggaaaaggggagcaaagggaaaacaggccgaagtggctaaccaaaaaactaaagaagatttacctgcagaaaacaggggaaacgaaaactgaggagagtccagcctctgatgaagcaggagataaagaagccaagtctgatgaataccatagaccatgtcttatcagtggtccctgtctcccttctttacaattcagaggaattttttttctttctttttttttttttttgagacagagtctcgctctgtcgcccaggctgcagtgcagtggtgcgatctcggctcactgcaagctccgcctcccgggttcacgccattctcctgtctcagcctcccgtgtagctgggactacaggcgcccaccatcacgcccggctaattttttgtatttttagtagagatggggtttcaccgcattagccaggatggtctcgatctcctgacctcgtgatccgcccgcctcggcctcccaaagtgctgggattacaggcgtgagccactgcgcccggcctccagaggaatatttttatcaactattttgtaaatgcaagttttttagtagctctagaaacatttttgagaaggagggaatcccacctcattccattttttaagtgtaaatgcttttttttaagaggtgaaatcatttgctggttgtttattttttggtacaaccagaaaattgtgtaggatattgaattatgggagactttgacagtctcgggtgtcagcttaacattccatagatgggggttagtttttatatcctgtaatacaaagcatattaaatggcaatatggagtcagtcctgcatttaatgtcttgaacattttaaattacttccatccccatgttgttttgtagtagaattgtttcctaaagaaaacaactccttgattatggctcaccctgttggagttgtgggcactctgtaacatctttggttgtggtagtcctgttttcctaataactttgttattgtgaagtgaaatactaaaaatttgaatatgtagtatacatgctattcagttgtgaactgtgggccatacataacagctgatcaacatgtgaagatatgggtacttagtctcttaaggaaaatttgcttccaaattttaagctggaaagtcactgggataacttttaaaaagaattacagtacgtggctttttagatttttgttactttttttttttttttttttttttttttgagatggagtctcactctgtggccaaagctggagtgcagtggtgcaatcttggcttactgcaagctctgcctcccgggttcacgccattctcctgccttagcctcccaagtagctgggactacaggcaccctccaccatgcctggctaatttttcgtatttttagtagagacggggtttcactgtattagccaggatggtctcgatctcctgacctcgtgatctgcctgcctcagcctcccaaagtcttgggattacaggcgtgagccatgaaacctggccgatttttgttacatatgttaagaattgtgtacaaattgaaatgtctgtactgaccctcaaccaataaaatctcaattatgaaagaaaaaaaaagaaaaataagtaattttacaggaggcctgaggtgggctagggtcactctgtgttctcctcctagggcagggcctcactctcttcccctctcagcagccgactctcctgttgagatcttctctgttggggattcaacatccctgggataagaataacaatgccaaggttttgactcttgaaaggagcaattaagtttctcaccccctcctcattttagatgggaaccatgagggccccgtcgtttaccccgcatcactgttgaagatctcatcctcactggaagactccttgtcctgcagcctcatggctttttttttttttaagatggagtttcactcttgttgcccaggctagagtgcaatggcgtgatctcggctcaccgcaacctctgcctcctgggttcaagcaattctgccttagcctcccaagtagctgagattacaggctgcgccaccgcgcccggctaattttgtatttttagtagcgacggggtttcttttttattttgagacagagtctcgctctgtagcccaggctggagtgcagtggcacgatctcggctcacggcaagctctgccttccaggttcacaccattctcctgcctcagcctcctgagtagctgggactacaggtgcccgccaccacgcccggctaattttttgtatttttagtagagacggggtttcactgtgttagccaggatggtctcgatctcctgacctcgtgatctgcccgcctcggcctcccaaagtgctgggattacaggcgtgagccaccgtgcccggcagtagtgacagggtttcaccatgttggtcaggctggtctcaaactcccaacctcaagtgatccacccgcctcggcctcccaaagcgctgggattacacgtgtaagccatcccgcctggcctttctagttagaattctgtgaggtttgtataaaaggaatagagtgggggcccaaaaaccagtaagatgagaaagtactgtttgctcagttctaggatccatgaaataaataataaataaataaaaaagagaaagtagtgtttcctgccactttagaggaaggactcacatatcctaccttccatcagccttgaaggagatgagtgccctctccaacacctggtggccttccctaccccttccccaaagcctccaagaaggcccctggcctagcctgatgcccactatcagcaggaacaggcacgacaaactttccccttcctatccctccccacctctggaaagggctggggacagcagatgtgtccttgttagttccatccatttcagctttggctggggagctaatttcactggagccaggataagcattagggtaagtaactatttttcctgtcttgggcagtttcctcactgacaaatgagggcagagttctaagctctcttctaattctaaaattctaatgtaaaaattgccagactagtggtggcgcaagcctgtaatcccagatactcaggaggcttaggcaggagaatcgcttgaacccaggaggcggaggttgcggtgagctgagatcgcgccattgtactccagcctggcaacaagagggaactccatctcaaaaaaaaaaaaaatcaccagactaatatttaccttgagtgttatgcgcatccatgtgaagagaccaccaaacaggctttgtgtgagcaatagttttttaatcacctggagtcagcaaaaggagatggggtggggcagttttataggatttgggtaggtagtggaaaaattacagttaacgtgcgttttctcttgtgggcaggggtgggggtaacaaggtgcttggtgaggagctcctgagactcattgtccaggagaaggaatgtcacaagatcaattgatcagttagggtggagcaggaacaaatcacaatggtggaatgtcatcagttaaggcaggaactggctatttcacgtttatggttcttcagttgcttcaggccatctggatgtatatgtgcaggtcacagggttatgatggcttagcttgggctcaggggcctgacattgaggattcttttttatcttcctctgatgctcttctataagaatgactctgttttggaagaaaacgcaattaagattttccatcacaacaaccactatctccaaatctgtattcattccttttaattcattataagtctcatctacctaatgagataacttttttgaagacaggaattgtatgctgtttaacagtgctttgtttcttccatagttcagtcatccttgatattttgcgggggactggttctaggatactgcccccacacaccagaatctgtgaacgctcaatcccttacatataatggtgcagtatttgaatataaccaacacacatccccccgccaccacccaattaacttttttactttttttcccccccgagacagagtcttgccctgtcgcccaggctggagtgcagtggcacgatctcggctcactgcaagctctgcctcctaggttcatgccattctcctgcctcagcctcccgagtagctgggattacaggtgcccgccaccacaccgggctagtttttttttttttttttttctttgtatttttagtagagatggggtttcaccatgttagcgggtggaccttgtgatccgcccaccttggcctcccaaagtgctgggattacaggtgtgagccaccatgcccagccaatttttgtatttttagtagagacggggtttcaccatgttggccaggctggtctcgaacacctgacatcaagtgatccgcccaccttggcctcccaaagtgctaggattacaggcatgagccaccgcacccagcctcagactaaactataataaaagagaaagcagagagagtaagagcacctcatatggaatcacctacatttcagaagctggaaagaaagagagtggtctacttgatgatatgaagcatgatcaatcagtatcaatactagctttagggtgaaggcatagccaaattggaaactgtggacaaatttcagaaactgcaccaaaacttacaaacctcaaatcctagttttcttcctttctctttggccactaccctcagtttcttttttttgtttttgagacggagtcttgctctgtcgcacagcctggagtgcagtggcatgatctcagctcactgcatcctccgcctcctgggttcaagcaattctcctgcctcaaccacccgagtagctgggattacaggaacccaccaccgtgcctagctaatttttgtgtttttaatagagacggggtttcaccatcttggccaggcaggtctcaaactcctgacctcaggtgatccacccacctcaagcctcccaaagtgctgggattataggcatgagccaccatgtccggcaagtttctttttacttaatttgtatttatttatttatttgagaccgggtcttgccctgttgccctggctagagtgtagtggcgtgatcatgggtcactgcagcctgaacctcctgggctcaagcaatcctcccaccttagcttcctgagtagctgggactacgggctgtcactactacacctggctaaatgttgtatttttagtagagacagggtttcatcatgttggccaggctggtctcgaactcctggcctcaagtgatatgcttgtcaaagtgctgggattacaggtgtgagccactaggcccagcctcagtttcttttatggactcacttacctctgcagattggctcaaatgtcattattctcaggcttctctcctgtttacaggtgtcctgggccatccagtccagtctcatgatatttgccacccaatgtgctcatgtttcccaaaccagcatctcttctctagacccatcctctaattagctgtttctcaagcaaccttttgactgttgtttctttttacttccctggtaccagggataaaagtcccctgaattcaaacatgaatattcacctcacccagtcctctgggaggtccataagtccctgttttgggaagaatgaagctgagctctagctaaaaaaaaacaactccatttggggatctaaaaattttgcagcttggaagtgcaaaaaaaatgtgcagctttgcacagtgagtcagggtgaccaagttctcctagtttgccaaagagtctctcagttttagtactaaaagtcctaaatcccaggaaacctctcggttccaggcaaaccaagtggtttggtcaacctgacagggaggtgtcctttatgaggtatggcaagagtgaaggcttggcaaagggtggctgtgcccatcaaacacagacagtttatgaatagttgggtgggtggggcatatgctttattccctagggccctcagggcctttgcagaggtctgtaagagctggtgggggcaatgggacagtgaaattcgggtataaggctaatgtgacctcatttaaaatcacaggctggagaggcccagggactttgggtatctatttacatagccaagataacatcagattcaaattttatttagtgctttttgtatctatgactgtcaaacattgtcacagtttaacagctacataatactccatcaaaaggatattatatgaagtgtggtggctcacacctgtaatccccacatttttgggaggccaaggcagatgaatcacttgaggttaggtgtttgagaccagcctggccaacataacaagaccacatctctactaaaaatacaaaaatgagccacatgtggtggcgcatgcctatattcctagctctgggactctgtctcaaaaaaaacaaaaacaaaaacaaaaaaaccaaaagaggattttcagtgtgttccagaaatgttcctattataaatacatctttgtgctaaaagttttttttccctatatgtaagatttgtttcaggctagatgcagtggctcatgcctgtaatcccaacattttgggaggccaaggtagaaggattgcttgaggccaatagtttgaaactagtctggtcaacatagggagaccccatctctacaaaaaaatgtttaaaaaaacttagccgcacatggtggcacgcccctgtccttccagctacttgggaggctgaggagggaagatcacttcagcacaactgttcaaggttgcaatgagctatggttgcaccactgtacctcagcctgggtgacagagcaataccctgtctcttaaaaaataaaaatatacatttttttctgtagtaatttggaagtaccattaagtgccagagactgtgctaagcactttacatgcattatttcctttaaatatcatcataaataacaccctggaataggtaatattctccccaggtagaaactggtgcttagaggttatgtaactttcccaaggccacatagtgtgtgatggagccaagatttgaaatcagcaccaccacatactttcaaaatatgttgatggtgaattttggtttgtttacagctgtgtcatctgttgcctggctttgctctactgagccaccactgagccttgtatatgtctctctttatttttggttatgtgcactgccccagtgaccacacagttctctctttagcacctctcccactgtgttgaaattgcttgtttacacttccactccacctacaagtggagggtagaactgcatttattcatccttttccaacacatctagcaagacgtagtagagacgcaagagaaatttgttaatgtataaaaggagaactccaggccgggtgcagtggctcacacctgtcatctcagcactttgggaggctgaggtgggtggatcacgaggtcaggagttggagaccagcctggccaacatggtgaaaccctgtctctattaaaaatacaaaaaattggctgggcgtggtggctcacacctgtaatcccagcactctgggaggctgaggtgggcggatcacaaggttaggagatcgagaccatcctggctaacacagtgaaaccccatctctactaaaaaatacaaaaaattaactgggcatagtggcggacacctgaagtcccagctacttgggaggctgaggcaggacaatggcgtgaacctgggaggtggagcttgcagtgagctgagattgcgccactgtactccagcactccagcctgggtgacagagcaagactccgtctcaaaaataaaaaaataaaaaaaaataagctgggcatagcagtgggtgcctgtaatcccagctactcgagaggctgaggcaggagaatcccttgaacccaggaggcggaggttgcagtgagccgagatcttgccactgccctccagcccgggcaatagagtgagattctgtctcaaaaataataataataaaaataaataaataaatggagaactccactggttaagagcgaagggaaggattacttctggatttaggagacgaactgctggacaggtcactcgacctgtagagttttgtgcattttggattttgctgattgtataaccccatggtgaggtttaacatgttcctctggaacaggaattaaaagaaattaaagaacgtgtaagcagaaactcagttgtatgtaagaaaacccaatttcccctgagaaaaagaaggagctgaagtcctttaaaaattaactgcctgtttttctgtggctagtgagccttatctctcctcctttcccaggcactgtgaagatcctgtttccctagctgtgcagctgcaaggtcactagacagataaactcaagttgtaaaaaatgtttttccttgaaaagtaaaaaatgatgtaatatatgtctcaattaattgaataaccgtctttgtttctcacttctgtaatatgcttccccctgcacagatctcccccaccccaccaaatgcttaaaaggtaacttaactctttgttcagggctcagtcctttggatgttaatccacctgggctggtgcacctaaataataaagatcctcctcaatcccatcagtctctctgattccttatcaatcctgctaaccctctaaccttatttcctgtaaattagacttataggcctaatcaaattcaggtttaaccttttggcaagaacactttacagatggtactgtgtactcttattagatcacttcagaagacgcatgtttggtttgtgattactttgtaaaaacagtgtagtaggtactcactaaaggaaatttagaaaataataagcttaaggctgggcgtggtgcctcatgcttgtaatcctagcactttgggaggctgaggtgggtggatcacctgagctcaggagttctagatcatcctggacaacatggtgaaaccccgtctctactaaaaatacaaaaattagccaggcgtggtgtcccatgcctgtggtgccagctacttggaggctaaggcagaaggatcacttgaaccctggaggtggaggttgcagagtgagccaagatcacaccactgcactccagcctaggtgacagaggaagactctgtctcaataaaaagaaaataaggccaggcacgggggctcacgcttgtaatcccagcacttcgggaggccaaggccggcagatcacgaggtcaggatttcgagaccagcctggccaacatggtgaaaccccatctctactaaaaatacaaaaactaactgggcatggtggcaggcgcctgtaatcccaggtactcaggaggctgaggcaggagaatcgcttgaacctgggaggcgcaggttgcagtgagccaagattgccccactgcactccagcttgggtgacagagctagactccatctcaaaataataataataagctgcactccagcctgggtgacagagctagactctgtctcaaaataataataataataagcttaaaaaataaaaactttagaaaatacatcaccccagttcccatccctacctgtctatccacaaaaccaaggcattcctgagagtaattcatttattatactaatataacaagtgtttattaagtatctactactatattcaagtactattctaggagatagaaatacagcagtttacaaaataaaacctgctctcacattctagtgtggtagacagttgatgcagaattaaagaatatatgggaataagtgtattaaagagaaaaaataagcagggtaaggggaaacaggtagtgtaatatgtatagggggtaggtgtacatggggggagtcaggaaaggtttcactgaggtgagactagaggacagcttaataatgtaaagaaacacgctatgcaacaattaggggaagagcattccaggaaagagggagcagagaaggcaaaccctgagcaggaccatgcctgtgtatgcaggacatcagataggtcaaggtgctaaaatgtaataatccaggaggatattgtagggaaagagcatcagagaggtagctggtaacttttggtaggaacctgccagctattttaaatctttagctttattctggtctttttaattttctttttttgagacagagtctcactctgtcacccaggctggagtgcagtggcacaatctcagctctctgtaacctctgcctcctgggttcaagtgattctcctgcctcagcctcccgagtagctgggactaaaggcatgcaccaccatgccttggcctcccaaagtactgggattacaggagtgagccaccatgcccggccatctttttaatttttaatgttaattaatttttatagagacaggatctcactatgttgcccatgctggtcttgaatgactggcctcaagcagtcttcctgctttggcttcccaaagtgctgggattacaagtgtgagctactatgtccagtgaaactttttttggggggagatggagtctcactcactctgctgctcaggctggagtgcagtggtgtggtcttggctcactgcaacctctgcctctcggattgaagtgattcttgtgcctcagccttccaagtagctgggactacaggcgcatgctgccatgcctggctaatttttttgtatttttggtagggaaggggttgcaccatgttgcccaggctgttcttgaagtcctgacctcaaatgatccacctgcctcagctgggattacaggtatgagccactacacttagccctaaatgtgaacttttgaaatggattttttgggtaaagtccaggcaggacatcaaagaacaagtatcctggtagtgcgacaagaatgtggttcttttcattaaatatttaactttttagaaaaggatcacaagggccaggtgcggtggctcacactgtaatcccagcactttgggagtctgaggcaggtggatcacctgaggtcaggagtttgagaccagcctagccaatatggggaaaccccgcctctgctaaaactacaaaaattaaccaggcatggtggcacgcacctgtagtcctggctactcgggaggctgaggcaggagaattgcttgaacccgggaggcggaagttgcagtcagatgagattgtgccactgtactccagcctgggcgacagagtgagactccatctcaaaaaaagaaaaaaaaaaagaatcataagaaaagctcggggacagtaaccttattgtgaaggatttagtaatactactcttgtaatcatggtgtttctgacgtagcacagggcagtgaaaagagaaacactgaactaagtcagaaggctgggtttctactaccagttgtgtatataagcagagccaccttgggctaaccactttacctgaacctcagtttccttctctgtcattcaccctgccagtctccttgggctattgcaagaataaaattaaatgctacttgggaaaatacttcacaacctgagatgacttgtaccaatgtgggtattattactgggaccaaatgtgactttaaaaagaaaaacaaccttgacaaagaaaactctgattggttactaaatccctatttctgagataagctacatttcaaagaaattctccgtaaaagaaaaattggattcagttatcataccagatggctttcattctcaccactgactcaattctgaaataattatatttcagtatggtaattataatctacactatataaacacactgtaaacataaactgtgaacagatgaaaactccaatatgtaaaaaggtaatgaatgttgaaggaagactgtgaaaagggaaaaggaaaaaaattaaaatgttccccttctaggtcctgatgagagtaaatgtttactataaaaatgattcaaatattttaaacacttttcaaaccaggcaatattttaggcctactgtatatttgcattttgagcttccaatacggataagtgactggaaaaagcagctaggtttaggttgaaaaacaacaacccaccggggaacacattttagcaaattcttctgaaagtcaaaaatgttacagtcataggtaaaaagttacaaagaactaccaatcgtcagaaatagctgccaatagtgacttagagtccagcagaaggaattttaggtcaagaaacctaaaacaggctgaaaaacttacctaccctatagctaccacaaataacactgtttccagtcatgatcaggaatcacatattaagacataactgcaaattgtgctatactgggtactgtattaaaaggaagtgaaatatggtccccatcctagaagtttccatacatatgagtctaaaaaaccattaaaaattaatcttaaggcctggcgcggaggctcacgcctgtaatcccagcactttaggaggccgaggtgggcagatcacgaggtcaggagatcaagaacatcctgacaacatggtgaaaccccgtctctactaagaatacaaaattagctgggcatggtggcacacgcctgtaatcctagctactcaggaggctcaggcaggagaagcacttgaacctgggaggtagaagttgcagtgaaccaagacggcaccactgtactccagcctgggcaacagagcaagaatccatctcaaaaataaaaattaaaaaaatctgggcgcagtggctcacgcctgtaatcccagcactttgggaggccgaggcaggcagatcacctgaggctgggagtttgagaccagcctgatcaacatggagacaccccgtctctactaagaaatacaaaattagctggcttggtggcgcatgcctgtaatcccagctactccggaggctgaggcaggagaatcacttgaacccaagaggtggaggttgtggtgagccgagatgtgccattgcactccagcctgggcaacaagagcgaaactctgtctcaaaaaaaaaaaaaaaaaatattaatctaacagaaaataggaaaaaagcaatgaaaagctagaaaacatacaatagttgactgaaaataaaaatttagcattaactttcattcttacatctttaatttttatgtatctgagtttttaattgatggtttaatttgccataatgagaaagaacatcctatttttatgactctgtcccatggaaatgtaatgataaatggatccaaatgccacactattgaggatttttttgatcactctgattgtcatgagtaagttgtgctttttcaaaagcagttttttcctacaatgtcatttcctgcttctctggctctgattttcaatgaattgataaattgtaaatcttgttttcctcttgtttttgtttagctaaaatgttgaagggcaagggagaggatggttatttataaatcttgtatctctctgaaaacacaacttgcattttccttaatctgattgacatgactccaaatatgaaaaacaactttcataaagcacaaaagaaaatttccttgaatttacccttttttattgtgggtaagaggcaataggtataaattttcaacttattttttgaatgttactcactattaaccaccatattttaaaaaattaattgaagaactaatgtagtttattatttaatttattcaacaaatgtttattgagtggcaactaggtcccaagtactgttttaactactgaatatacagatgtacataaacgaaacaaaaatctctgctgccctggagtttacattctgtgggactagagataaaggatagatacattacatagaaggtcagctagtaataagtgttatggagaagcagcaggaatggaggataaagtgtgtcttgagggtgttgtaactttaaatagcggtgtctggaaatgaaaaggtggtatttcaatcaagattttcagaccatggctgggtgcagaggctcatacctgtaatcccagcactttgagaggccaaggtgggtagatcacttgaggtcaggagtttgagaccagcgtggccaacatggcaaaaccctatatctacaaacacacacacaaacacacacacacaaattagctgggcatggtgatgcacacctgtagtccctgctactctggaggctgaggtgggaggatcgcttgagcctggcgaggttgaggctgcagtgagctgtgatagcaccactgcactccagcctctcgacagagatcctgtataaaaaaacctctgcatttcactgtatgtaaattatacctcgattcaaaaacaaaatgtggccgggcagggggctgacccccccacctccctccgggacggggcggctggcctggcaggggctgacccccacctccctcccggacggggcggctggcctggcgggggctgacccccacctccctcccggacggggtggctgccgggctgagacgctcctcacttcccagacggggtggctgccaggcggaggggctcctcacttctcagacggggcggttgccaggtagagggtctcctcacttctcagacggggcggccgggcagagatgctcctcacctcccagacggggtcgcggccgggcagaggcgctcctcacatcacagatacttgaaggcagcatgctcgttaagagtcatcaccactccctaatctcaagtacccagggacacaaacactgcggaaggccgcagggtcctctgcctaggaaaaccagagacctttgttcacttgtttatctgctgaccttccctccactattgtcctatgaccctgccaaatccccctctgggagaaacacccaagaatgatcaattaaaaaaataaaaaaataaataaatgtgaacagtacagtccccttttccttttataaatgaagaaaaacaaaggctcactccaagagtcagacttgctaaaggctttgatgatttgcagtattcttatttaaatgtacagagccagcttcagaggaaggttcttccaaagacctatcccctccatgacaccaaccatccatgatttttttttttttttttgagacggagtcttactctgttgcccaggctggagtgcagtggcatgatctcggctcactgcaagctctgcctcccaggctcacaccattctcctgcctcagcctcccaagcagctgggactacaggcacccgccaccacacctggctaatttttttgtatttttttagtagagatggggtttcacctgtagcaggacgagctgcagacaaaactcctcagacaccgagttaaagaaggaaggggtttattaggccggaggcatcagcaagactcctgtctcaagagccgagcccccgccccgagtgagcaattcctgtcccttttaaggactcacaagtctaagggggtgtgcgtgagagggtcgtgatcgattgagcaagcaggaggtacgtgggtacgtgactgggggctgcacgcaccagtaattagattggaacaaaacaggaatgagattttcacaatgcttttctatacaatgtctgtaatctatagataacataaccgattaggtccgggattgattttcaactaccagtcccagggtgtggcgcccgggctgtctgcttgtggatttcatttctgccttttagtttttactttttctttctttggaggcagaaattgggcataagacaatatgaggggtggtctcctcccttattcccccactttgagactctcactcaatagcaggagttgtttcatgtttactacccatgtcttcttgctagacagatcaatagtgatttatatagtacacttgtgctgatgcattttggtatactaaggtagcgatgaagctttttatcatttgaagaagtacaggtagcaaacgagggagcagtaagtaggttcctattactattataactcttattataagagttttaaatcctcctagcgctgggaaccattttctaaacatggccccaggatcaaatccatgccacacttgcacgggcacatgtgccacttttgtcatatctctaactatgtcttcaactacttgcccttggttatctatgtgtaggcagcaattagtaaggttaaatttcctacagacctctccttcagctgctagcaagtagtcgagagctaatctattttgatagatagcatttctcatctgagtttcttgctgggccagaatagtcaaggctctgccggttgcagtgattatttttaagacagcttgtaaccgtatgattcagttgatcatataaatggggatccggtatccccacgagccatcttgtgcctaagtagcaggcccataatactgtatgattctctcagggggccatttatcattgtttcaatttcttatagctatgcttttcacgggaagcatagacagggaagcccaggagttctcctgtttttatggacagtaggaagaaagatggtttaatagtgccaataacacaactacttgtcaggcagcttagtgtaggctctatgtccacatatccagtatagcccagtgggggctgtccagtcccggtgggattctgggtgggcctaaacggtctgcaactttggaaatttactgaatggatttttctctgtgtggtttgaactccaccatgtagtcttcctacaggaagggtgaagtccttctccactcttgctatatagtattgtctaatgattgaggcttttaggacccagaaattatcagggtgattcttttgagctgggaattcatcaggaactgggtctgtaggtactaattctcgggcttcccatggccattgatctgctattacagttcctccacatacataacatgaagtgacagtgagagactgggctacatgctcggctaattgcaaaaacaaatttcttgtttttcctggaaattctgttattggcacatttagttcatcatagaaagtttgaaacactggctcaagagagcatttgtaaacttctcctcgaaccaagatatttactcggggattcagtccagccccattgattcctaaggtcacacgctactcttttttccagcgaggatcaaggggattggttattactagctctaaggggttacattgtcccttagcacaggaagggccatttttttcctttctgaaggtggactggatccttttcattttttttaaatccaagtggcctaaatgacacaagaccagtatttacatttatttccacacagtcctaatttatgacagatgtacttattttctgccatatagcctcttttctaattaagagaaccacactttattcctaacttattactattaatgacagcacaggcatcaaattttaaggtgacttgtttgggcacccctttttcttctgttttggctaacactttactcatatcatttatgagcccccaccagtcctcagtccttaatcttattttaaaaaccgtggtcatgggaggctcagatgggtcataacacacatcaggttggtcacttcctgggctacataccttgtacagaataacattatacaaacaagttatttttagagttccagtacacttataataaccataaaataataggactgtagcaaccttttgtcctacctcagtgacttgatgtatacactggaacagtcctcagtctgaggaaggtcagttgaagtccttactgtaaaagtccaaattttaaggaaaatgagttccgcaatgagttttctcatgcttcggccgtgcgtggaccagtcagcttctgggtgtgactggagcagagcttgtcgtcttcttcagagtcactttgcaggggttggcgaagctactcccgtccacgtacccctcacagtctactgatgtttaaggatagtctcggaggttgggcctgctagaataaactgagtccaacacctctacacagtatgttcaactaggctctctgataccaggagcaaggtggtggggtttagggtgttgcaaacttcagtggttatgtggggattttcacatagcaagctttggtacttggttaatctagcatttgtaaccaatgaggtcctttggtagtcattaaagttaccacagcatggggggcctttatattcaggttttcctaagggttagtttatctgcttcttgtgctaacagggctgttgctgctagggcccttagacctgggggccagcctttggaaatcctgtctagttgttttgagagataggccactggccttggccagggcctcacagtatgggttaaaactccaactgccattttttctctttctgacacatagagtgtaaagagttttgtcaggtcaggtagcctcagggctgggaccaacatgaggttttcttttaactcatgaaaacctcgttgttgttggttgtaatagatgtagtttatctaatctacatttttattaactgtcacccactaaaatattgacttaaatcctgcagctatttgatttcaagctttaaattgatctggtattcttcgtgggactccaattgcatctaaatagacatgagagtcgaaagacccataaggggcttctctcgctttacaatgtctttctttttttccttctggttgatgaaatgccagggtgaaagggatagccaattggactaaagtacaagtgccactccagttatttggcagagtgcccagtaaaggtccaccacaataccaccacacatctgctcggggatgaacaagggctgactgattgataagctcttgaaaattcttaagctaactgcatcctttcaggtctccaaggaacgctaagtttcctccctgttgtgagagacatgaagtgaacttagtgttgggagatggaggatggatggccctcgggggctgacccgcagggtgctggactttgggatatagcagagagagcttggcatgacttattaatacaggctgtagaatcctggaaaagagctaccaggcagcccacatctggtcgactggaggaccaccttagtggaaaggggacaatctgggcctctggcctgccatgtgcacaagcataacaattgcttttgtttaacgtgcagatggaatatttgatgcattttaaccaggcatttgcatcttggtatcctgtcttcattggtaaagtttgttttaactctttaacttctatgatcctctagtaaaacgaatgtatggttttaggaaattacaaaaactggttggggcagtccattcttgctctttagtggtccacagaacgttggaccaactacggcataaaaactctacatcaggggacaagactcctggttggcactggggtctttatcgaaatctccctggattaaatggtcctagtttactaatgtccagtctgaggagagtcaggagggacagaagtacttttctgaagtagagagctgtctttgacttggcaagtccccacagggtataacaaggcaagcattaaatgcaatagtttgaggtgaaattgacttggttatgttaataactagatggtcagcaatagcacgaggaaagaaagaagagtaatagaatagatgaaaagagatttttcgtagctttagtttggcagggttttcctctgggactgtggcccatgactctggagggggtggcactttcttgattctggtgtgacgagtccatccttttttgctgtacgaacagcagtcttggtggttagcaacacaaggtagggtccttccaggctggctcgagtttttcttctttccacctttcgatgagaatgtgatcttcaggctggtgctggtttactagaaattctaggggtggtacatgtgctaaaagacttttagtttttgagagaaaggaaagtggaaaataaaccaagcatataattctaaggaactgaccttttgttttaaatgtggggaccttggcagtggactttatagtccttagtgcctttttcctgagaaatttcctttagcacctatttttattagtttttaaaccaaagaaagccaaataccattttacatttaacagtgcttctcgtatgatttttataccagataagctaaattttatctttatattagtgtgttattaatattaaacttaattttaataaaaccttgtagacatatgtatctaattgttaatgtttgaccataaggtaagattttatagattctttttaaccctttataatttttgcaaaagagcaggttggtgctttaagaaaaaacctgttatgcttttactttaatgtccagttcacagaaaaactggatgatacttctttaactttagctaatatgtttacacacagaattttctttacaattaacattttgaaacttgcttaaatcttcaaaacaataattatttttaaccttttaatgtaggtgaaaatgtacatccttatgcctccttacaattcttttaccaaagatatattttacttttcttatacaccttgcatataaactgttttttttttcaacagttttacattcaggaggcctagttacttttaaattatacaacattttttgcataaatttttttataacatttttctctttcgtgactttcgcagacaattcttcgatatgcctcaactttctgacttattacaaatatttatttctttaaacaaccagttaatttgtttcaggacaagaatttaccatataatactctttttatataaattccgccccccctttttttccttttttttttcgaagatgataaccattcttttccaaagcgaaccttttttgtgtcttgtggactaggccacaagaatataagttactatatacatgttacactgttaacttttagcaaactttagttgaaaacctttaaaaaaaattttaaaaaaatgcatgttgtgcacatgtaccctaaaacttaaagtataataataataataataaaaagaaaaccttctaagtttgggattttaattatcctttgctattaataagaccttgttttgtctaaattagaattggtatagatggcttttttttcttaactttgtatctctctctctttctctctttctttctctctttgactttgtctctctctttgactttccttttgcctctgcctcttcctctctctctgtgtgtgtgtgtgtgtgtgtctctctctctctctctctctctatccttgactctctgtctgtctcttcctgtctcttcctctctctcttttcctcttttcctctctgtctctttcctttctctctctctgctggtctttccttgcctctgccagccacttatgctgctgttctctcaaccactatgtgttgggggtggggggtctaaaaccagctctaatcaagtgtctctgtaagggaactggtctgggttccttggcttataggttaccttgtgccatacctttgaaacaagggacctgtccaggcttccttctaatggccaacctacctctaatgctggccagtctatcttacacaaagttttaagttttcctggtgtcatagcactccatagtctccctcagattcttttttgaaatttgtcaacatagttcctagtggggtgggcttattcgtgcctgacctatgcttcttcaagacaaaacaccacgctcacaccacaaacacaccacaaaacaaagaaccggtaaaaagggcgcacacacagttttgcagtttgcaccaaaccaaaatcagagtatccagaaatccaagccaggtcaaaaccaaaaccaaagtatcaagcaatccaagtcaagtcaaaaataaaaaccaaagtgccaggagaggcacaccatgggtgatcaggccacacttccactcaaatggagtaggcaagttcccaagaccaatcctgtcaagcaattcaaaccaaaaccaaagtgccaataaaggcacgccatgggtgatcaggccatgcttccactcaaatggagtgggcaagtttcaaagactactcttaccaagttttagatgtccagactccaagtgcccgttccttcccggtgttcagccactgcgttgatcctccatgggggcctgccatacagtgctctggcgaggcgtcccagtggggcaaatgcctaaccaggagcgccctcaggatccgtgttgctcgggctggttggagtcccctgcagggatgttccacagggcaggtttaagccgcctaaggagctgccttgaccatccgccattcacctcgcttcccagtcagggaaccaagaaatcgagctgcagacaaaacttatcagacaccgagttaaagaaggaaggggtttattaggccaggggcatcggcaagactccggtctcaagagccaagctccccgagtgagcaattcctgtcccttttaagggctcacaactctaagggggtgcacgtgagagggtcgtgatcaattgagcaagcagggggtacgtgactgggggctgcatgcaccagtaactagatcggaacaaaacaggaaaggcattgtcacagtgcttttctatacaatgtctgtaatctatagataacataccaatcaggtcaggggttgatttttaactaccaggcccagggtgtggcacctggggtgtctgcttgtggatgtcatttctgccctttagtttttactttttctttctttggaggcagaaattgggcataagacaatatgaggggtggtctcctcccttacaccatgttagccaggatggtctcgatctcctgacctcgtgatctgcctgcctcggccccccagagtgctgggattacaggtgtgagccacagcccccggcctcattcatgatttattttgccatttcaagtgatggagctggttttagagctagaagaaaaccaaaatgccagttaatctaaactagattcctgccccagtgcagaaccaatcaagacagggtccctgtctttcagggaccacaggatttgtgttgaagaggagaggagtgggagaggcagagtggatggagaacaaggattcattttctatacttttaaagttcttcagttaagaaaatcagcaattacaatagcctaatcttattagacatgtcttttcctcccttctatgtaaggtcaattctgttcatttgcataggagataatcatataggaatcccaaattaataccctcttctggtgacttaccagattggacactgtaagattttctgcatagcattaaggacattttgtacttcttcaacgcaaacagcagataaatctatctctttctgttccaatgaactttaacacattagaaaaacatgtatcttttaaaaaggtttagaaaaatgacaacttcattttatcattttaaaataaggtaaattgggctgggcgtggtggctcacgcctgtaatcacagcacttagggaggccgaggcgggcggatgacctgaggtcgggagttcaagaccagcctgaccaatacggagaaacctcgtttctactaaaaatacaaaaaaatgagccaggcatggtggtgcatgcgtgtaatcccagctactcgggagctgaggcaggagaatcgcttgaacccacgagtcagaggttgcggtgagcccaaatcacgccattacactccagcctgggcaacaagagcgaagctccgtctcaaaaataaataaaataaaataaggtaaatttaagatttggaaggttttagaataatacaaaatcctttaaaggttctagaagttgctttttgtaattagacaatataaattctgtattttttcacatattgcttccaaccctttgggtcttttcctttctccaagaaagagaaagctacaggggagtgactgaccgggtaagtggtgagctttctccaatgcttctggctgttttctttttcttgcataaaaccaaaatcaacaacgaccaaaccaacaccaatcaaggcctccctgcccctagcctttcccagcgacccactctcatctcaggatccccctcaagcacatccctgccggcagcatctgttactactgacgctcctctacttccctcttgcgctttctcaatagcacaaatggatccagttcttaagttctccctcccacaaaatcctgtctcctccccttcccagacatattcctggcacttcttcttccgcaagggcccatcttctcatatataccagccggtgtttatttctttgtttgtttttgagacggagtgtcgttctgccacccaggctggagtgcaatggcgcgatctcggctcactgcaacctccgcctcctgggttcaagcgattctcctgcctcagctcctgagtagctggcgcgcgccaccacgcccggctaatttttgtatttttagtagagacggggtttcaccacgatggtcaggctggtctcgaactcctgacctcgtgatccatccgccttggcctcccaaagtgctaggaatacaggcgtaagccaccatccccggcgaccagctgatgttcttatacacatggtgtccccttcaaggcacattccagttcctatcaggaggattcctcctcggacacactgtgcccccaacctgatccttagtgcttccctcgagacctacaaactgcccccttccccggggggttcacaacgccttatgcctctcaggttccgcccccgcccctcgcataagaatacccatctgcctagcttcggaaattcactttcccccgcccgtcccccggagcatcccttgggcccctgtccctttcccggggctcttctaccttaacccagagcagagggtgcaggcctcctgagcccaggggcccagttatctgagaaaccccacggcctgtcccccgtccagaacgtctcagcgagctcacgacgcgcagtcacgtttttttccccccctctacactgcagatgtggctcccaatgttgacgttggccaggacctttgcaaacaagccaggccaaaaagtttcaatatttacactggctgctttaataagggcattgatcttatcctccgtaaaggtcacctcatagtcctgcagaatgagggcagagtagatgcaggcaagctgggagacggaggccatagcgcgggcgagtgtggggctggggctgccggacgcggtgctactcaccggatgaagtgagggtctcaccccaacgcggccttagcttcctcggaaggaccgaacaccttggcggcagccgaggaaaggggttccacagttttaatttatctgtaattcccacgctttactgttgccacggaaaccgctgagcaatagcctctcagaataggaaatcaagacacagtcagaggaagggcgggacagaaagagcctagcatctctcggggctctgggttggccacccagtcctcccctggtgacataaaaagaaagagacggaaaaggaagaattctacctgagttcgccgtaaagcgcccgccctctcgcctctacgcttccagttgcggcttattacgtcacagtaattgctgtaccaaggtcagaatcgccacctgaggcctgaatatcagcgtaagatagtgtccaaagcagtcttaagaagaggtcccattaccccactctttccgccctaatggaggtctccagtttaggtaaataaaaggattgttgggaggtggagggaaagaactactatttccaacatgcattgcggaacgaaaggccttggccacactgttccttggaaactgtagtcttatggagaggaacatccaataccaaagcgggcacaattctcacggaaatccagtggatagattggagacctccgcgggcttatacatgtcaacagtaatggattggagtgttgttatgttctcctatcttgagagcagagactaggccaaaaaaagatacctacaactcctaggaagactacgattcccatccagccccacgagtctcgggcaagtagtcctctaaggtcagtggcctgcggggacgcagtgggcgccgaatttgcctggggaaggggaaatccgctctggcccacatctgcgcactcctagttccgcccctcagcctcaatgtttgttattgttgttcgggttcaggttgcttctgccccgccccatcgacgcaatctccaccaatcaatggcgtggtcgttttgagggacaagtggtgagagccaatcatcttggcgaacactcggagaaacaggggactagttactgtctttatccgccatgttagattcaccccacagggatagcggcagagccggtagcggacggtccttgcattggcctccggcaggcgccccccgggggcgggaagctggtaaggaagcagctgcggttacctaggggtggggtcacgtcacgctaagagggtttggggaagttcaagggaggaatcctgcaaagaagaggggcgactttttccgtgtttcgggacagctaatctttttagtgacaggatgagagagcccttcatgttcagagggaccgagttggcgagaagcgccggagagttggagagtctgtgggtcagaacatccggcttctactgatggaaggccacgactccccagtggaatgagggcctaggcaaagaaaatgagagagccctcggggtagtgacactgtcttgggaacatggagtgctaggaaacgaaaactggaagactaggatgaactctgcaagtaaaaaaatgacactacttacacatccttctcatcccatcctcgttttttcgagaccttaaagagatctccttggttagggaccttcggttttggaaaggcactgtttttcctttttgtcaaacactcagctttcaggccacacttttttgagacagagtcttgctttctcaaagaccaacccaggctgggcttgaactgctgagctcaagcgatcctcgtgccttggcctcccaaagtgctgggattacaggtataagccaccgctcccggcctcaggtcacacattttaaagcctggataacttggcttgtaaaggcctctggtggagacagtaatcaaagctcaggttgccaggtctgtttcattaaagggattttgttgaggctgaaaaaaaaatcgacgtggaggaaaagctaacttgtgccaagcaaaggtgagtcagtggcatggacttacaataatgccagttatgaaagctgaaggcctaagacccagctatctgactctactggctgtagacctaaggggcagatagggttaaccatagctttggtgtttacacacgtttaagattaatgctcctgctgaaagaatttttttacatgtcagccaaagagagttccttatgaagacctggatatggtccagccaagctagaatctcccacttcctgttttctcttagttggcccaccagctggaggagctccagagtatctaaatttccaattgtgtaatttgagaaaaagagaggaagattcatttccttcacaagtagggaagtgtgtttcttgaagttggaaagtgatatttcagaatacccacttttggcggactgagtcacttcatttccttgattttttgcctaaggtcctggggaattgacaaagattctcaaattttaaggaccccaataattacatttcatatgaatgaatactagatgtcagcaggattgttgttaagagactaatattattttggtggtgaacttggttcttggtagaaacaaagaatggagaaaattgggggataattgtcttagggtttcaaaaaagtgcctttaaatgacagtcttaattgtagtattttacagggcagtgcattacattgtggaaaacagtacaggtttatggttctaaagactggtttattattatttatttatttatttgagatggagtcttgctctgtcgcccaggctggagtgcattggcgcgatcttggctcactgcaagctccacctcccaggttcacgccattctcctgcctcagcctcccgagtagctggaactacgggcgcccaccaccacgcctggctaaattttttgtatttttagtagagacggggtttcaccgtgttagccaggatggtctcgatctcctgacctcgtgatccacccacctcggcctcccaaagtgctgggattacaggcgtgagccaccacatccggccctattattttttaaaatgtttaattgaacttaatttttttaaggagacagggtctggctttgttgcccaggctggtcttgaactcctaggctcatgatccttccgcctcagcctcccaaagtgctaagattaccagcatcagccaccacacccgtccagttttttattttattttatttttgagacagagtctcgctctatcacccaggcgagagtgcagtggcatgatcttggctcactgcaaccttgcctcccaggttcaagcaattctcctgcctcagcctcctgagtagctgggattaaaggcctgcgccactacacgcagctaatttttgtatttttagtagggacgaggtttcaccatgttggctaggctggtctcaaactcgactcaaacgatctgcctgcctctgcttcccaaaatgctggaattacagacatgagccactgtgcttggcctttattatcatattttttatatttgaatgacattttgaaagaacttgcgtacacatttttaatttgatccttatggtaacactgtgagatagtcaaagcagacgtattagacctattttataggttaaagaaccgaagctcaaaagcgaactgacctgctcacagttttatgtctagtaatgggccggaggtatgtctggaagctaagtcttcccagtttgtgtgctcctccgcctcccctctgccccccacccccacccccgcagaccacgctgtaaatccctgggacttaatcttgttcctctcaacctaagctattttttcatatcttgttcctctcaacctaagctattttttcataaagtcataaaaaccagttaaacgtaaccattcatcagtaaacaaaatccttaattaaaaacataatgatcagaatagaaatctgattaaggaattgttaacttgttaggcatgataatgatatctagactgtttttaaaaaattcttatcttttagaggtacatactcaattcttaatggataaaagcatagatgtctgtcaaaataatctagtagggaaagggtattgctgtaaacctttggttacagcaaattggtcctgagttgataattatgaaagaagctagcttatgggtccatagggattcattatattctctctacttttgtatagatttaaattttcccataaaaatattttaaaaaatagtccgggcatggtggctcacgcctgtaatcccagcactttgggaggccgaggtgggtggaatcacgaggtcaggagatcgagaccatcctggctatcacggtgaaaccccgtctctactaaaaatacaaaaaaattagccaggcgtggtggcgggcgcctgtagtcccagctactcaggaggctgaggtgagagaatcgcttgaaaccagaaggtggaggttgcagtgagccaagattgtgccactgcacttgagcctggacgacagaacaagactctatctcaaaataaataaatacaataatataaaataattatattattatagtttggttaaaacattagttgactatggtcagttcattgttggggcagaagtgggagatgcgggggtatatgtgaatgaggatagccttgagttgattgttggtttaactaagtgtttattactctccacttttatatatgtttgaaatcccccatttaaaaaatcagtacaaggccaggtgcggtggctcatgcctgtaatcccagcattttggaaggccaaggcaggcagatcatgaggtcaggagatcgagaccattttgcctaacacggtgaaaccccgtccctaccaaaaatacaaaaaaaaaaaaaaaaattagccggatgtggtggcgggcaccccagctactcgagaggctgaggcaggagaatggcgtgaacccaggaggtggaggttgcagtgagctgagatcgtgccactgcaccccagcctggggcgatagagcgagactccgtctcaaaaataaataaataaataaaataaaataaaaaatcagtagattgtgaaaaaacatagtaacttggatggagggcattgaatgctacctctgtgtagtttcttggctagtgttttggcctgtaagttcgtaaaactggtagaaaacctaggttctcaagttaggacaaccctccttctgcaagaaaaatgtagaatgtcactctcaagtcatacaagaatacaagttccctgagggcagagaccttatctctcttatccatgttggtatgtcctgctactagtaagtatttgtttagttaaccagtcatcataaagtaccgtaaggattttacaaatgctagatgatttctgggaatgtggtcaaaatttaaatactttcagcatacttctgtttccacatgtttccaacatgtggaagttcctaataacttcaagaataatttttgtgacttaagtacaagtctttatggcatggttttagcctatctttctttcctgaaacaattcctatttaacagtgatggtaagtttcgtaagaacagggacagtgtttcttttgttcattgctgtctcccaagcccagcccatattgggtcctcacaagtatttgctgagtgaacttttagtgcaacttatagaaccctttctaatgtgtttttctctctctcccaccaaccttctcaaccctagcctcacagcatggaaccacaggttactctaaatgtgacttttaaaaatgaaattcaaagctttctggtttctgatccagaaaatacaacttgggctgatatcgaagctatggtgagtgttactttattttgtttctccttggtttaagcatggttattttttccaaaggtagctatttttagcagtgttgtttcatagctgtgaagtctgtcatagttaccatttctgggccttttggaaaattgcttttgatagggtttcagtattcatatatgagatgtgccccaataaagggaaccaacacataaatttccttttgaacattttagaaagggaaggtaaaattgtttttagtgagataggatttagaaaacctattaattttagaaccagtatgaggagtgaattggtgtggactccacccaaccagatcccaaggaaatgttctcttgtgtgaggatatgacttgtgttttgcacaaggatataacttgtgttttgcaagagcctatcaattgtttttattgctaggtcagaggttgagtatctcagagttgagcaggaaaaactttcatacctgcttagacagcagttcacctgttccgtttttttgctaaggcttttcctcctcttggtttgccctttgtactcttctgtttttgttcagtttgcagtggtgaatgttttacttcctgtgttgactgtgtttctctctgaaaccctttggtaaaaatctacgtttacctggttatatctgatgataactaaaaagggaaagaaatggtagatcttaaaagatgatctgaggtagttgtctgccttccagcaaatacctgttcatactgtcctatcagtgacagtgagacccgtctcaaaaaaaaaaaaaagattggattcagaaagaagttagatcttgtttgccaaaagatgtgaaaatcagttatctttcttttcctagtagttaaatgagctgacagcttgccttttttcttccttgtaaattttaaattgtataagtataatacatgcccattttaagaagagaaaccatctcaagcagttaatagccctccattctcccccccctcatctgttactcccaccttctttgggtaaccaatgttaacagccctgtatgtactttaaattttccatgttcatgcagatatcatactaggatcatactataaacattatttggccaggcacagtggcacacgcctagaatcccagcactttgggaggccaagatgggtggaccacttcagctcaggagtttgagaccagactgggcaacatggtaaaaccccatctctaccaaaaaaatacaaaaattagctgggcctggtagcaggcacctgtggttccagctactccggaggttgaggtgggcgaattgcttgagtgctggaggttgaggctgcagtgagccaagatcaagccactataatccagcctgagcgacagagtgagacccatctcaaaaaaaaaaaaaaaaagatatttttcgttttttttttttcttatcttgaaacttcaggagatatccatctatacacataacttatacactgttctacaggataaactctgtcctatacaaatgtgagattaatgggtcacaaagcattttatttgaaattttaatagattctgccaaatgctttgcagaacaattgtagcagcacacagaaatacatgacagtgtcctgaagttttgacaacactggatgttatggctttaaaaaacatttgctgttccctaccccacaccccacccaaaacacacacacacacacacacacacacacacacacacacacacacacacagtttggtattctgatgagatgtcatctcattgcttcaatttgcattgttctgaccaccagaaagtttgaaagtcttctgatgtatttgttaggtgttctgatttcctcttgtatgaattttatgtatatttttacctgggttgttaattgtatcattagcagttttgctggtactctgggtgtgttgcagatattaaccctttgttatgggttattaaggttgtttgttgtttgtcttttgattttgtgggttttttttactttgacttctgtgtacattataacctgcctttaaatatgtatctcttttataggtaaaagtttcatttgatctgaatactattcaaataaaatacctggatgaggaaaatgaagaggtaaaatatattatggcacttattgctaggtgttcagaatagggatcttatttctccagtgatatgggctttaataattcaaaatagtgtttagcttatttgtgtggtggtttaaatatatttgataactgaatattctaagaagacttgcagcatctgagatggagttgagaaatggagaagcaacactgaagaatatctcagagataactttcacttaaaaaaaaaaaaaggaaacagggtctcactatgttgctcaggccagtcttgaactcctgggcccaagcagtcctcccacctcagcctcccaaagtgctgggattataggtgtgagacacccaccatgcctggcctggcctgagagaaccttttttttttttctttttttttttttgtgagatgaagcctcactccataacctaggctggagtgcagtggtgcgatctctgctcactgcaacctccagctcctgggttcaagtgattctcctgtctcagccttctgagtagctgggattacaggtgtataccaccacgcctggctaatttttgtatttttagtagagacggtatttcaccatgttggccaagctggtctcgaactcctgggctcaagcgatcagcccacctcggactcccaaagtgctgggattacagttgtgagctaccacacctggccaagataacttttaaaattatatagtgaccttaagttcacatatagcacaagctaccacttagtttataataatacaaatataatggctaagctttttttttttttttttttaaagagggtctcactctgttgcccaggctggtgtgcattggcatagcttgctgcaacctagagctcctgggttcaaggaatcctcccatctcagccttctgggtagctaggacatacctctctgcatctggcaaaattttttaattctttggagggatggaatctcactttgttgctcaggctaatggctaagctttattgagtggttacagtgtgtcagactagccacagtaccatgtattgagtacattattatcatcactattttactcatgaggaaactgaggcacagagaggtgaaaataacttgtccaaatgcacaaaaacttggaagtagtaaagtagccgttcagtccataccctctggctgtagaactcaagctcctaactgttatattgcactgccttttaatgtatctgaaataaaggagggcacagtagataagcaataaaatttcttaagtgttattcatgactagcaagtgatatggaaaagctgaacgcttggcctgagtttttgtctgtcctatggggctggtcctagtaacagaaatgctcaactgatgagacacttataattcactgttgctttttttccttttataggtatccatcaacagtcaaggtgagtccctaagagagtctgttcagccttgtttaaaaaccttaatctgctcattgaggcatttctatttatactcaaaccttattgcagtattaattttagagtgacattgcactgatggacattagttacctaggggattttattgtatagcagttttttatatataggatgatgcctttgaatggaccctaaggacagctttaatgggaggttctcatatttaagatgccagtcctctgaaattaatatgcctcccagttcaacacatataagtattcccatggtgttgcatttgtttctgacttggtatatatgttaatatcaacttataaaacaagtggtattccaaaagtttatttatcagatgttcagagcttggagtgcattttcccataggaaccatgttatagttgaagattagtttcccacgatagcccctaaaatcttaatttaatcaggtgaaatgatagtattaacattgaactctcagtgcgtaaatgtgagggacctgggttgagattttgtaactggaagattcccagtagtgatgaaggagggatttaaggggaagaactgatctacagtagatgctgtttgcaacaaaaagggagtttgtcagcaaaaagatagttgctgttcatatataataagctaagaattctttaaagtcaggattagctgtacatttaacaaatttttattgtatatattgaaggtgcacaacatgatgttatgaaatacatatacagtaatgcatcgcttaatgacagagatttgtactgagaaatgcatcaattaggtgattttgtcattatatggacatcatagagtgtacttacacaaacctagatggtatagcctagtacacacctaggatatatggtataacctattgcttataggctgcgaacctgtagagcatgttactgtgctgtatactatagacagttgaaacacaatggtatttgcatatctaaacatagaaaaggtacagtaaaaatgtggcattataatcttatgggatcaccatcatacacatggttgaccaaaatgttatgtggcaatggttactgtagtgaagcaaattaacatatctatcatctcattatagtggccctgtggtgccctgagccctccccagaaaccagccataatctactcatttagcaaaaatcatgaatataatttacgattatttaactataatatgttcctcatgttgtacagtccatctttaggattggctatccttaatcttatggaatctttggttcttgaatgaatgaatggatgtgtacaaaataaaaataattttaaaataatagaatcttttggggtgtgtgaagaagtatcatggtgtatattttttgttcttttaggagaatatgaagaagcgcttaaggtaatgattatttaatctcatttttaaataatttaaaaaatattattatgggttggttttttttctttttttgagatgaggttgtgctctgtcatccaggctggtgtgcagtggcacaatctggggttgctgcagtcttcacctcccaggcttaagtgatcctcccacctcagcctcccgagtagctggaactacagaaacacgtcaccacgcccggctaactttttatatttttcttagagacagggtttcaccatgtttcccaggctggtctggaactcttgggctcaagcaatctgctggccttggcctcccaagtgctgggattataggcatgagccactgcgtctggcctaaaatatttattgactgaaactcaaacctgaattccattagttatggggagagactagtacgtataaacacagtgaaacctgtttatagggagactgatgaatgggcacgacactcagcaaaaggcaattcataataaaaaggtccttctcagttacagtcccatctctttgctggtctttgtgctactgttctagtgtttaaaaatacaaataactggccaggcgtggtggctcacgcctgtaatcccagcactttgggaggccgaggtgggtggatcacgaggtcaggagatcaagaccatcctggctaacgtggtgaaaccctgtctctactaaaaatacaaaacagccgggcgtgggcgggtgcctgtagtcccagctacttgggaggctgaggcaggagaatggcgtgaaccccggaggcggagcttgcagtgagccgagatcgtgccactgcactccagcctgggcgacagtgagactctgtctcaaaacaaaaaaaacaaacaaaccaaaaaacaaatatcttggccgggtgcagtggctcatgcctgtaatcccagcactttgggagactgaggcaggcggatcacccaaggtcagcagttcaagaccagcctgaccatgatggtgaaacctcatctctactaaatacaaaaaattagccaggtgtggtggtgcatgcctataatcccagctacttgggaggccaaggcaggagaatcatttgaacctgggaggcagaggttacagtgagctgagatcacgccattgcactccagcctgggcaacaagagggaaactccatctcaaagacaaaaaaaacccaaaaaactcttgatgccccccttttttttttcctaaagaggctgggtcttgctatgttacccaggccagccttgaactgctgggctcaagtgatcctgctgcctcagcctcccgagtagctgggactatgggtgtgcaccaccatgcctgttctagaactatgtttactggttcacatttttcacctctttccctcactctgttctctccttttttttttttttttttttttttgagacagagtctcactctgtcgctcaggctggagtgcggtggcgcaatcttggctcactgcaacctccacctctggggttcaagtgagtctcatgcctcagtttcccaagtagctgggattacaggtgtgcgccaccacacccagctaatttattttgtagtttttagtagagacagggtttcgccttgttggccaggctggtctcaaactccttacccaagtgattcgcctgccttggcctgccaaggtgctgggattacaggcatgagccactgtgcacagcctatgtcactctgttctctatagcccatacaatgttatgtttaaggcagagatgacagccactttttggacatggaatgcttttttttttgtttttagtttctaatttttaaaaatttgtatgtttaaatataaaaatgtgtataaaatgtgatgttttgaaatatgtatacattgtgaaatgattaccacaatcaagttaattaacacatccatcacctcagatgtagttacccattgaatgctttttttcttttttttttgcgacggagtctcgccctgttgctcatgctggagtacagtggtgcgatcttggctaccagcagcctacacctcccaggttcaagtgatgttcctgcttcagccttcctaatagctgggattacaggtgtatgccaccatgcccagctaatttttgtatttttagtagagacggcgtttcaccatgttggccaggctcatctcgaactcctgacctccggtgatcctcttgccttggcctcccaaagtgctgggattacaggcgtgagccactgcgcctggcgtctttttttttttgagacagggttttaccatgttgcccaggctagtcttgaacttctaggcttaagcaacccatccacctcagcctcccaaagtgctaggattagaggtgtgagccatcacgcccggcctctttttttctttgacgtgtgtgtcattccttttgttgttgttttttgagatggagtcttgctctgttgccaggctggagtgcagtggcgcgaccttggctcactgtaacctccacctcccgggttcaagcagttctcctgcctcagcctcccgagtagctgggactacgggcatgcgccaccacacccagctaatttttgtatttttagtagagatggggtttcaccatgttgtccagggtggtctcaatctcttgacctcatgatccacctgccttagcctcccaaagtgctgggattacaggcatgagccactgcgcccagcgacacgtgtgtcattctgtcatagaggctggagcacagtggtgcaattatggcttactgccccctcaacgtcccaggctcaagcagttctcccacttcagcctcctgagtagttgggaccacaggtgtgcatcaccacacttggctggttttgtttgtttgtttttgagtcttgctctgtcacccagactggagtgcagtggtacaatctcagctcactgcagcctccgcctcctggattcaagcaattctcatacctcagccacactaatagctgggattacaggcatgtgccaccacacccaactgttttttgtatttttagtagaaatagggcttcgctatgttggccaggctagtcttaatctcctagcctcaagtgatctgcctgcctcagcctcccaaagtgctggtataacaggtgtgagccactgtacccagctaccacacctggctagttatttttatttttaaaaagttttttttcactgacagcacttgttaaaaaaaatcacttcgatatatttttttgagacgggatctcactgtcacccaggctggagtgcagtggtatgatcacagctcacatagctggagtgcagtggtgtgattgcagccttgacttcctgggctcaagtggtcttcctacctcaggctcctgtgtagctgggactacaggaaaataccaccatgctccgatgatttttaaactttttttttttttttaatagagacagggccttgctgtgttgcccaggtttgtcttgaactcctgggcccaagttatctgcctcagcctcccaaagtgctcggattacaggcatgacccacctctcatcgccccaaaatactattctttttttttttgagacagagtctcactttgttgcccaagctagagtgcagtggcgccatctcagctcattgcaacctccgcctcctggattcaagcaattctcctgtctcagcctcctgagtagctgggattacaggtgcatgccaccatgcccagctaatttttgcatttttagtagagatggggtttcaccatgttggacaggctggtctcgaactcctgacctcaggtgatctgctcagctcagactcccaaaatgctgggattacaggcatgagccaccgcgcctggccccaaaatactatttttattggaaaagtaaatgcttaattataggacatatctttaagtttcttgagttttgttagtctagaattaacctttttggaaacctgagttaagattccatagagagagtcttgtataaaaaccaattagactaggcgcagtggctcacacctgtaatcccagcactttgggaggctgaggcggcagatcacgaggtcaagagattgagaccatcttggctaacatagtgaaaccccatctctactaaaaatacaaaaattagctgggtgtggtggcgtgcgcctatagtcccagctactcgggaggctgaggcaggagaatcgcttgaacccgggaggtggagtttgcagtgagccgagattgcatcactgcactctagcctggtgacagagcgagactccacctcaaaaaaaagaaaaaaaaaaaaacagaaaaatagtaacccagttaaggagaatcttacctaatttgccatcttaaaacctacttttatgggtttttttgtttgtttttgtggaataaagcaacacaatacttttgtggttttaataacaaaaccaagttcatgaccggcctgggtaatgtatgacaaaaaattttttaaattagccaacaggcatagtgacccaaacctatgatactagcactttggaaagccaaggtgggcggagcccgggagttcgagactagcctgggcaacatcatgaaatttcacctctacaaaaatacaaaagttagccaggtatggtggtgcgcacctgtagtcccagttactcaggaggctgaggtgggaggatagttgaactcaggtgtccaagaccagtctgggcaacacagtgagactcctgtctccaaactaaaacaaaaaccttagccaggtgtggtggcatgcgcctgtaatcccagctacccgggaggctgaggtgggaagatcgcttgagcccaagagacaggctgcagtgagccatgcactgcattccaacatgggtgacagagcaaattgccatctcaaaaaaataaaaataaatttctaggctgggcacggtggctcatgcctgtaatctcagcactttgggagggcgaggtgggtggatcacctgaggtcgggagttcgagaccagcctagccaacatagtgaaaccccatctctactacaaatacaaaaattagctgggtgtggtggttggcacctgtatgtaataccagctacttgggaggcttaggcaggagaatcgtttgaacccaggaggcggaggttgcagtgagccaagaccgtgccattgcactccagcctgggcaacaagagcaaaactccgtctcaaaaataaataaataaataaataaataaataaataaataaataaataaatttctagttaacattcttaccaaagaaatagcaagttgagtgtaaacattacatttgttgttggatttaataaagcaaacacaaatcctagtattttctagcataacttaccacactcttctgttttgatgtctttgaaatgttatttaggagaagataatcacgtcgcatgtttttgtttcataatgtatgctcttagatggcagttaaacagggaaaccaactgcagatgcaagtccacgaagggcaccatgtcgttgatgaagccccacccccagttgtaggagcaaaacgactagctgccagggcagggaagaagccacttgcacattactcttcactggtgagagtcttgggatcagacatgaagaccccagaggatcctgcagtgcaggtatgaagggtatggcccagtctatccaatatcgtttcttttttcttttttaaataaagctgaacaggtttctttattttatttttttattatactttaagttctgagatacatgtgcagaatgtgcaggtttgttatataggtatacatgagccatggtggtttgctgcacccatcaacctatcatctaccttaggtatttctcctaatgctatccctcccctatcaccccaccccctgacaggcccccgtgtgtgatgtacccctccctgtgtccatgtgttctcattgttcaactcccacatatcagtgagaacatgctgtgtttggttttctgttcctgagttagtttgctaagaatgatggtttccagcttcatccatgtccctgcaaaagacatgaactcatccttttttatggctgcgtattattccatggtgtacatgtgccacattttctttatccagtctatcattgataggcatttgggttggttccaagtctttgctattgtgaatagtgctgcaataaacatacgtttgcatgtgtctttatagcagaatgatttataaccctttgggtatatacccggtaatgggatcgctgggtcaaatggtatttctggttctagatccctgaggaatcgccacactgtcttcaacaatggttgaactaatttacactcccaccaacagtgtaaaagcattctatttctccacatcctctccaacatctattatttctttttttttgaaacggagtctcactctgttgcccaggctgtggagtgcagtggcgcgatctcggcttattgcaagctctgcctcccgggttaacaccattctcctgcctcagtctcctgagtagctaggactataggcacctgccactacgcccagctaattttttttatttttagtagagacagggtttcaccgtgttagccaggatggtctcgatctcctgacctcatggtccgcccgccttggcctcccaaagtgctgggattacaggcgtgagccaccgcgcccggcctccaacatctattatttcctgacttttttttttttttttttttttttgagacagagtcttgcaccttcgccctggctggagtacagtggcgtgatcttggctcactgcaacctctgcctcccaggttcacgtgattctcctgcctcagcctcccgagtagctgggattacaggcacacaccaccacacctggctaattttttgtatttttagcagtgacagggtttcagtatgttggtgagactggtctggaactcctgaccttgtgatccgcccacctcggcctcccaaagtgctgggagtacaggtgtgagccaccatgcccagccctgtttcctgactttttaatgattgccattctaactggtgtgagatggtatctcattgcggttttgatttgcatttctcttttttttttttttttttttttgagatggagtctcactctgtcgcccaggctggagtgcagtggtgcaatccgggctcactgcaagctctgtctcccgggttcacgccattctcctgcctcagcctctcgagtagctgggattacaggcgcccactaccacgcctagctatttttttgtatttttagtagagatggggtttcaacatgttagccagaatggtcttgatctcctgacctcgtggtccacccgcctcagcctcccaaagtgctgggattacaggcgtgagccactgcgcccggcctgatttgcatttctctaatgaccagtgatgatgagctttttttcataggtttgttggccgaataaatgtcttcttttgagaattgtctgttcatatcctttacccactttttgatggggttgtttttttcttgtaaatttgtttaagttccttatagattctggatattagccctttgtcagatggatggattgcaaaagttttctctcattgtgtaggttgcccgttcactctgatgatagtttcttttgctgtgcagaagctctttagtttaattagatcccattgtcaattttggcttttgttgccactgcttttggtgttttagtcatgaagtctttgcccctgcctatgtcctaaatggtattgcctaggttttcttctagggtttttatggttttagatcttatgtttaagtctttaatccaccttgagttaatttttgtataaggtgtaaggaaggggtccagtttcagttttctacatatggctagccagttttcccagcaccgtttattaaatagggaatcctttccccattgcctgtttcagtctatccaatttctagatttatttctcattgtctttgttgtaagatttgcacatttatcagagatttgggaattagtgtgctcctctctctgacttttgaaactggtaatagtttacttctgtagaaggggagcaggctagagactttgttttcctttagtacgccttcatactgtgactttttaaaaaattatatacttgtatgatttcacaaaagaaacctcaaaataatacactccaggaaaagtattttaaatagaaaaagtaacctctaacatctcggcttgtgttttctcccagtcgtttccacttgttccatgtgacacagaccagcctcaagacaagcccccagactggttcacaagctacctggagacggtgagtgttctgtctcgcttgggttttaactgcggtgttggcacaggtggaatgtggaagaaatagaaaactgaacccaggtggctgctgcctctagtaccggtgaagagtggtagcttataatttccaaacttagaacagttccagtcgagaaagctctaacctttgcagtgaagtgtcagaaaaagagggagtctaattctaagcatgtaagggagagggacaactctctgcttgagaaaaagttagaaatttacttatcaaaaggatgttttgatattttcttcgaaccagtttagctgtggaaggaatagaccttttgctatgtttctgtctattcagtagcagttgtttattgtgtttttgtattataccagagacagttaggtttcagatctattgatatcttcacatttttttctgatattggaactgagttttttccctaccttctgctccatattctagttcagagaacaagtggttaacgaaacggttgagaagcttgaacagaaattacatgaaaagcttgtcctccagaacccatccttgggttcttgtccctcagaagtctcaatgcctacttcagaagaaacattgtttttgccagaaaaccagttcagctggcatattgcttgcaacaactgccaaagaaggattgttggtgtccgctaccagtgtaggtaagcagttgcttgggagtagctagctagtgatagaccttacagcttttacctccctggctttctgtgtaggtaaagggaaattaattgtaccctgtttctgagcattagatgttgtagctgtgagttggaagcacaagctactcttcacccacatgctttgtatgttgtaactattcagattgttgtgttcaaatgtgcatttggattagcaaagccaggcaaaattatgttcccctgaacggacaaaattagatcactaagggtagttcctcggttgttccaaatgcctttttttttttttttttggtgacagggtctctgtcacccaggctggagtgcagggtgcaatcatggttcactgcagcctcaccctcccaggctcagacaatcctcccacttcagcctgccaagtagctgggatcacagactgccttttaattatttttttggagatggggtctccctatattgcccaggctagtctcaaactactggactcaaatgatcctcttctccatggcctcccaaagtgctgggattacagacatgagccactgtgcctggccccatgtactttcacatcttaccttcctcccatagattttcatttaaaatggatatgggttaagtgttattatcctcattttattaatgaggaaaattgaggcatggcatagtcagatggcatgctcaggttacctgctagttggtactggagcaaacatagaagtatggtcttatatctccctaccccaggtacttcctattctgccattgtgtattgtgccattctttccccacagcctatgcccatcctacaatatctgtgaagattgtgaagcagggccatatggccatgacactaaccacgtcctgctgaagttgcggagacctgttgtgggctcctctgaaccgttctgtcactcaaagtactctactcctcgtcttcctgctgctctggaacaagtcaggtaaaaccctctacatggagatgcttattctctgattgacttcttggttctggtgacagggtatgaatcacaaaactacagatagtctccttagttctgctcattttcaattgatgtgcaataatgaagacagttatccaaagttagtgaaatagaaataatagctataaaaagaaattaagaaactaaagtaggctgggcacaatggcccataactgttatctcagcaacttgaggggctaaggtgggaggagtgcttgaagccaaatatttgagaccagcctgggcaacatagcaagatcccgcctctacaaaaaaaatttaaaaattagccaggcgtggtggtgcgtacctatagtttcagctacttgggagtctgaggtgagcagattgcttgagcccaggaatatgaggtggaagggagccatgattagaccactgtactccagcctacatgacagagtgagaccctaattctaaaacaaaaaaagaaattaaactggaagctgacactgatggaaattgcaattggctccacatagcttcagaatttatttgtgactttcttttaagacttgcttttattatctcacaggctccagaaacaggttgataagaactttcttaaagcagaaaagcaaaggttgcgagctgagaagaaacaacgtaaagcagaggtcaaggaacttaaaaagcagcttaaactccataggaaaattcacctgtggaattcaatccatggactccagagccccaagtctcctttaggccgacctgagagcttgctccagtctaataccctgatgtaagcccaggactggggtgggagccaaaactttaggcccagctctctgaaactggaacttcaaccaatttccgtcttatttattggtagcccttaacacctaaatctttaaaactttccattatctggtcttagtattttttgtttgtttgttttttgagacagagtcttgctctgtcacccaggcggtagtgcagtggtgcgatctcggctcactgccagctctgctttcgggttcacgccattctcctgcctcagcctcctgagtagctgggactacaagcacccgccaccacgcctggctaattttttgtatttttagtagagatggggtttcaccgtgttagccaggatggtctcgatctcttgacctcgtgatccgcccgccttggactcccaaagtgttgggattacaggcatgagccacacagcacccggcttttttttttttttttttgagatggagtctcgctctgtcgcccaggctggagtgcagtggcatgatctaggctcactgcaacctctgcctcccgggttcaagtgattctcctgcctcagcctcctgagtagctaggattacaggtgcatgccaccatgcccggctaatttttgtattttttcagtagagatggggtttcatcctgttggtcaggctggtctcgaactcctgacctcatgaatccgcccgccttggcctcccaaaatggtgagataacaggtgtgagccactgcgcctgcctggcgtggtcttagtattattaaagggtggtttggtagttttttgtttgttttgtttttgagacggagtcttggagtctcgcctgttgcccaggctggagtgcagtggcgcgatctcggctcactgcaagctccacctcctgggttcacgccattctcctgcctcagcctcccgagtaactgggactacaggtgcccgccaccacacccagctaattttttgtattttttagtagaaacagggtttcaccgtgttagccaggatggtctcgatctcctgacctcgtgatctatctgccttggcctcccaaagtgctgggatgacaggcgtgagccaccgcgcctggccaagtttcgtagttatttttgacacttgttttgtttccttcttcagaaagatagaaaccactaaagttcaaaatggcggggtccctctcttcattggaggcaatctggaattgaagcaaaaggaacaaatgtgttaaaagcctgactctctaggtgttgtatttataggcccttttaattactcttaccatgacttttttagctcaggagtgagacctatcctctgttttgttttattgttttaagtttgtcagaaaatttattgtttctaatatgtggtcctatactagtaatatcagtattatttttaaggcaaatgggttagcacattttcaagagtcacagtcagactctcaagctagtgtgaggtattcagaagccttcacacccaacagcaagtgactaagcatctgaatttctgttcaggctccctttgcagccctgtacctccgttatgccaatgctcagtgcagcatttgtggatgagaatttgcctgatgggactcaccttcagccaggaaccaagtttatcaaacactggaggatgaaaaatacaggaaatgtaaagtggagtgcagacacaaaggtaatttttcccacaaaatgcaaagatgaggtgatttgaagtggcagagtgctcagctgacaagcttgctttctcttcttactgttcttttcagctcaagttcatgtggggaaacctgactttggcttccacagaaaagaaggatgttttggttccctgcctcaaggccggccatgtgggagttgtatctgtggagttcattgccccagccttggagggaacgtatacttcccattggcgtctttctcacaaaggccagcaatttgggcctcgggtctggtgcagtatcatagtagatcctttcccctccgaagagagccctgataacattgaaaagggcatgatcagctcaagcaaaactgatgatctcacctgccagcaagaggtgagcattgactgacaggctttggcctagtatccaaatcttagttagagaggagatggctaaaactaaaagaacccactcatagctggttgttttccagaaaccttgaaaggttagcatctccccccgccccaacacatctctatgctgatatttggcctcttccttagggtgtttgttttagcgtctttagggtcttgctgcatactgaatacttttgtacctctttgtgatgttgcatggtcagcctgttggctgcacaagggaaaaagggactcctggcctgggctggcctgtggaactgctgaactgatagctttactccttaacatccatctctcctgaaataccctgtgtatgttccctaaatactaatgaagtcttgccctggttgctacttagtgaacagttttttaatgcaatttctctgtattagtggggcagagtgtttactgcttaaagttatccaatgttaattttctggttttgactattatagttaatataagttatcgtcattaggggaagctggggaatgtgaattctctctgctgtttttacaactttttctataactgtaaaaatatatcaaaaacattgttttttaaaatatggaggtacagcagcgtttttatttttgggggcattgtcagcctgcctcttcagttctgttgaaggcctaaaatttgtctcaatggtttgtctctataggaaacttttcttctggctaaagaagaaagacagcttggtgaagtgactgagcagacagaagggacagcagcctgcatcccacagaaggcaaaaaatgttgccagtgagagggagctctacatcccatctgtggatcttctgactgcccaggtggaagattcagcactttgaagggcaagggacagagggagagagcacaggagagaaggtggtagagccataggcagtaatcaggaaatcagagatatgcccactttgatctagtcaggtatatttaatgggaaggagatcacccatggaagcaagtttgtaaactagatgtttcctctttgaattgggaactcaatcctgtacttccccacaaactccctttagttgcctcttcaccttggcctagctaattctccttcatacctgctgcattttctctttcctgctattgggttatttcaacatctaattcccatttaactcttcttgttttcacttgtctggggacaggcatgaatttgaacagagttgaatacgaaatgatgtggaaatggtctacaggtcccatcaagacatggctccagcatgcactccaaacagcctaacattgtctttttttataggacctgctgtcctttgagctgttggatataaacattgttcaagagttggagagagtgccccacaacacccctgtgggtaagaatgtcactcatttcatcttgttcgtcttactaataggcacaaaagtaccacagcctagacactggtagtgttttattctgaggaaatggcaaggatttctcccacagtaggatagtaaagcagcaatcatggatccgtttttcttctttcctgtcctttgtcaaaagtaacaacatgctgggcatggtggctcgtgtctataatcccagctctttgggaggccaaggcaggaggatcacttgaggccagggtttgagaccagcctgggcaacatggtgaaacccccatctctacaaaaattacttttaaaaattagctgggtgtggccaggcacggtggctcacgcctgtaatcccagcactttgggaggctgagacgggcagatcacctgaggtcgggagtttgagaccagcctgaccaacatggagaaaccccttctctactaaaaatacaaaattagctgggcatggtggcacatgcctgtaatccgaactactcgggaggctgaggcgggagaattgcttgaacccagaaggcggaggttgtggtgagctgagattgcaccattgcactccagccaggacaacaagagcaaaactccgtctcaaaaaaaaaaaaaaaaaaaattagcttggcatggtggcctgcacctgtggtcccagctaccagggagactgaagtgggagaatctcctgatcccaggaggcagaggctgcagtgagccaggattgtgccattgctctccagcctggatgacagagtgaaacccaatctcaaaaaacaaacaaaaaaaagaggctgggcacggtagctcacgcctgtaatcccagcactttgggaggccaaggctggtggatcacaaggtcagaagttcaagaccagcctggccaagatggtgaaaccccatctctactaaaaatacaaaaattagccaggcatggtggcaggtgcctgtaatcccagctactcgggaggctgaggcagagagttgcttgaacctgggaggcggaggttgcagtgagccgagattgtgccactgcattctagcctgggtgacagagcaagactgcatctcaaaaaaaaaaaaaaaagcaataaaacaagttcgtgcaaggcttttccactataaaggaatcctcttctcttttttccctctagatacttgtgtccttttgttcctttatgttcatggttttgtgtcttggccacagctttccaggctaaataactgtgattcttcctgcattgattgatctgagatattttgcttacttattggtctggagaaattttttgtaacagacctcaaagcatatcttggtttattttagccctgcgggaggcaagaagcctacaaactgctacttctggacactgactgttgatgatatgatgctttctcttgattgatggttctcctgtcttcattctccagatgtgactccctgcatgtctcctctgccacatgacagtcctttaatagagaagccaggcttggggcagatagaggaagagaatgaaggggcaggatttaaagcacttcctggtaagggattaaacatttgtaaagtatttgcatcctccctttccatatcataccctattttacagctatcccctactgaccctaccttagcatgtaaatgggcttgctttctgtagcatctcatgttttgaagtctcctcaccttcacatggcacagatagcagctattccttggtttagttttagcatgggtaatgactggtgaatgttcttcagcactttaaacaccaagtgcagacaaagtttagatagcagctattccttggtttagttttagcatgggtaatgactggtgaatgttcctcagcactttaaacacccagtgcagataaggttcgtgtgtctttcagattctatggtgtcagtaaagaggaaggctgagaacattgcttctgtggaggaagcagaagaagacctgagtgggacccagtttgtgtgtgagacagtaatccgatcccttaccttggatgctgccccagaccacaaccctccttgcagacagaagtccttgcagagtgagtgtccttgcatttcccctacctagcagggtggcacctgaattgtgactgccagacttgactagttagatgtgctcttcttcactgagactgaagggagagtgatcttagttagaagttctgatcttggcggggcgtggtggctcaagcctgtaatcccagcactttgggaggccaaggcaggcggatcacaaggtcaggagatcaagtccatcctggctaacatggtgaaatcccatctctactaaaaatacaaaaaattagcctggcgacgtggcgggtgcctgtagtcccagctactcgggaggctgaggcaggagaatggcatgaacccgggaggcggagcttgcagtgagccaagattgcgccactgcactctagcctgggcgacaaagcgagactccatctcaaaaaaaaaaaaagaaattctgatcttgtttgtgtctttagactctacgtatgctacctgactgttctaattagagcatcaggagtaaagaagccatcatactcatttctccatcttctcaggggcagaattacagctgcattccacagtggaatagcagccagttgtgctgcctggattctgcagtaaggaatcttcctgtaatttgacagagctccttagcagagacccctatgggtagctgagttgtctgctttctccaagggcagcagtcccagaaacagtggatagaagcaggagtaccaacaaagtttctcaaggttaaattctgctgtaataaatacctttataggccgggcacagtggctcacccttgtaatcctagcactttatgaggctgaggcgggtggatcacctgaggttgggagttcgagaccagcctgaccgacatggagaaaccccatctctactaaaaatactaaaaattagccaggtgtggtggctacatgccaaggattacatgcctgtaatcccaggtacttgggaggctgaggcaggagaatcactttaacccgggaggcgaaggctgtggttagccgagatggcgccattgcactccagcctggcaacaagagtgaaactccgtctcaaaaaaaaaaaaaggaataaatacctttataacagaaacttctaggtatcagatagatagaaccaatagcatatattttaagaagtatccaaaaattcaaatatactatgtcaaaataatattggagaatctctttattataatcaaatttgacctatatctttaaatattatttatcttacttttgtttaaagtatacatgtaaggccaggcgcagtggctcacgcctgtaatcccagcactttgtgaggccgaggcggacagatcacaagctcaggagtttgagaccagcctgaccaacatggagaaaccccatttctactaaaaatacaaaaattagctgggcgtggtagcgtgtgcctgtgatccagctactcaagacgctgaggcaggagaactgcttgaacccgggaagccaaggttgcagtgagctgagatcgcaccactgcactccagcctgggtgacagagcgagactccgtctaaaaaaaaaaaataataaagtgtacatgtggccaggtgcggtggctcatacctgtaatcccagcacgttgggaggccgaggtgggcggatcatgaggtcaggagatgaagactatcctggctaacacggtgaaaccccatctctactaaaaatacaaaaaataagctgggtgtggtggcgggcgcacctgtaatcccagctactcgggaggctgaggcaggagaatggcgtgaacctgggaggtgcagcttgcagtgagctgagatcatgctactgcacttcagcctgggcaacagagtgagactccatctcaaatcaatcagtcatgtatatctttatatttttttccacatgtgtgtacaaatacataacaaaaaggtctggaaagacagtaccaaaatgttcacagctgttattctgataggatttatgggtaattttttttttttttttgagataaggtctcactcgcccaggctaaagtgcgagtagcaagtttatggctcattgcagccacaacatcctggggtccccctacctctgtttcccaagcaactgggaccacagccacatgctaccacaatgagctaaatttttttttttttgtagagatgggatttcgccacgttgcccaggctggtcccaaacttctgagctcaagcagtctgcctgccttggcctcccaacgtgctgggattttaggcgtaagccaccacacctggcctgggtagctttttttttttttgggacacagtctctgtcacccaggctggagtgcagcagcgcggtctcggctgactgcaacctccgccttcccaggttcacaccattctcctgcctcagcctcccgagtagctggcactacaggcgcccgccaccatgcccgggtaatttttttgtatttttagtagagatggggtttcaccgtgttagccaggatggccttgatatcctgacctcatgatctgcccacgttggcctcccaaagtgctgggattacaagcgtgagccaccgtgcctggccctgggtagcttttttctatccttttttaccctctcaaacatgattggccagttttctcccatgactgcatcatctttgtaaagaagaggaggagatagacatataatcctgcaatactcatctcctaactttttctctttttatagcactgttagtgtatcagttttggtttaaactctactcagtatattaaccatcacataaaaaggaaaaaagggatggagctgcctccttttatgattcatagagcttcttggaaacctgagtgtttctgcctaccttgtttctgtgagctttgattctattttgttttgcatagtcttcaaacttagaatatggtcatagttccagaaccagcccttccctttagttcttccctctcctctggctttcataattctagcttatgatccacaaggctttaccaagtaaggatagtacttaggcctgcttttagcttccaccttaaaattggttgctttcatcctttagtgacatttgccttgcctgaaggaccacttggaaatgagaaggaggagattatccatatcgctgaggaagaagctgtcatggaggaggaggaggatgaggaggatgaggaggaggaggatgagctcaaagatgaagttcaaagtcagtcctctgcttcctcagaggattacatcatcatcctgcctgagtgctttgataccagccgccccctgggggattctatgtacagctctgcgctctcacagccaggcctggagcgaggtgctgaaggcaagcctggggttgaggctgggcaggaaccagctgaggctggggaaagactccctggaggggagaaccagccacaggagcacagcataagtgacatcctcacgacctcacagactctggaaacagtgcccctaatcccagaggtagtggagcttccaccgtcactgcccaggtaccactcacagccccctcagctggggtgttcttcagaggtgaaataaagagaggaatcgacctgatctcaaaacctgttttttcctcagtatggaaagagactattttccatagcaaagtctgaatttagatgaataaaagttgtatttcccagtatttgtggattctggatttaaagaaatatttgttttagttggccttaaattatctgagtatagtctgtctgcttatattttgattattgagagctggttgtgtttttttttttttttttttgagacagggtctcagtctgttgcccaggctggagtgcagtggcacaatcttggctcactgccacctctgcctctgaggctcaagcaatcttcccacctcagccccctgagtagctgggactataggcatgggccaccacacctagctaatttttgtatttattgtagaagcggggttttgccacgttgtccaggctggtcttgaactcctggccttaagcgatccaactgcctgggtctcccaaaatgctggaattacaggtgtgagccactatgcctggctgagagccagtttttaaacacaaacatccctggaccttccctccttgttttattgactcttcagtaaaggcagcaaaaactcaacccaaacagtcataattaggaagttaaatccattatgggaaaaaacactataaaaccaaactaattatttttaattctctggtgaatctatctgaatcattcttgtctcctaatagtagggaaaatgctggagccttgactataatgtaaaccattctccccaaaagctagacatttccgtttattgacaccacttgatataggtggggacatgaccagactgaagccaacatttctagcttgcctgtggctaaagaggaaaatggggtagaatgtagcccttatgatggaaccctaaatccagacatgtgatctggatcagaaatgtgaagcctctgtagagaatttggcactgctgtgctgtgtttactatttctccactgttgccataagtgccttttcaatttactttccatattgtgtctttctgaaaggagctctccttgtgtacatcatcatggttccccaggagtggatttaccagttaccataccagaagtttcttcagtccctgatcagatcagaggaggtaatgatcagcctaagctttttctctttttctctgctcctgtctaatggaaaccaggtataaatagcctctctctcttcgtgattcttggtggttttttgaaacttgcccttcacaggccaggcgtggtggctcacacctgtaatcccaacactttgggaggccaaggcaggcggatcatagggtcaggagttcgagaccagcctggccaacatagtgaaaccctgtctctactaaaaaatagcaaaaattaaccaggcatggtggcgggcacctgtaatcccagctacttgggaggctgaggcaggagaatcacatgaacctgggaggcggaggttggagtgagccgagatcgcaccattgctctccagcccgggcaacagtgcgagactccgtctgaaaaaaaaaaaaaaaaaacttgcccttcactctctccatgctcctcctgcatactctaatttctattctctggctgaatatattgttagacctcatagaggtagtggaaagaacacaggctttggagccaaacaatctaggttccagctccatctccccctttcctgactagcagttcagcaggtttctaatggctgtgagtctgttttcttactacaaaatatatcagtgtgttaggattatagagttgatttttctgattcaataaacaatcatcttgcattgcatttctggacagtttctccttatcacttaaactacccttaaaacttcccaaatactttaaaaaaaaaaaaaaaagacttcaaacactgtgatcagattgccacctgcctcaataatagccttgctgtgagttaggaaacagtaggtgcttatggatgctgcatctaaccaacagctcttttgcttttagagcccagaggctcatcaggacttgtaaacagcagacagaagagctatgaccactcaaggtaacaaccttgtgcagtctcttttttcagaagcaggtggatattcttgtattccttctgcttaaaagagcctctcacagtatgtacccatcttcagagagcagagaaggggagcctttgttccgtcttattcttgtttcttctaaaggctttgagcaacactgaacaaacggctaaagctgatgtttaagagtgttctgtttgggaggccgaggcgggtggatcatgaggtcaggagttcaagatcagcctggccaacatagcgaaaccccatgtctactaaaaatacaaaaattagccaggcatggtggcgggcacctgtaatcccagctactcaggaggctgaggtgggagaattgcttgaacccaggaggcggaggttgcagtgagctgagattgcaccattgcactccagcctggctgacaagtgaaacaacatcaaaaaaaaaaaagagtgttttatgtttcagacaaggaaatagtgtccacaaattacctcactcttagcactggggaaaaggtagaaaggttaagcccagtatacatttaaataattttttcttggacatacctggttctctgcttccactcatattaggccagtgtccagaaaatcacatttcctttgcaaggtgttttctctgagagaataattgagcagacaaactgttgatatccttgtgtgtcctcgatcacattaattttcagctaggagtgagagccatcatggttaccagagtggtgtgtttcctgcagtgcccctatcttgcttgcaccagtagagctgggccctccatcaaaccatgatctgtagctataaagctgataatgaaagcaattgtgttctctttttccatctaattttttctcttaaggaaatcttattccaaggattagagcccagattatcttgtaaaaaggtaatgatttgtgtttgtttggggagataatttggttttcctctgcaggcaccatcatgggagcagcattgctggaggactggtgaagggggctttgtctgttgctgcctctgcatacaaggccctgtttgctgggccaccagtcactgcacaggtcagtgtgtgtgttttattttcctgaatctcaactccatgtcaccagtgaaagtgatggcatctgtctgggttgaagagtaacatggcattgtggaaagggcataggctttagatttagtctttagttaacacacaacacaactctgccactttttttttttttttttgagacgaagtctcgctctgttgcccaggctggggtgcagtggcgcgatctcggctcactgcaagctccacctcctgggttcacaccattctcctgactcagcctcccgagtagctgggactacaggcgcctgccactacacccggctaattttttgtattttttagtagagacgatgtttcaccgtgttagccaggatggtctcaatctcgtgacttcatgatcttcccgcttcagcctcccaaagtgctgggattacaggtgtgagccaccgcacctggccaactctgccactttctaactatatgactttagccaagttacttaagggaagaaaagagaagaatgtattattgatgatctattaatattttctatagagagaagctattccaggtgttggcactatggcatgaataaaacaccagttcttggccgggtatggtggctcttacctgtaatcctagtactttgggaggccaaggtgggaggattgcttgagcccaggagtttgagaccagcctgggcaacatagtgagacccccatctctacaaaaaaatttaaaaattagataagtatggccggtacagtggctcacacctgtaatcccagcactttgggaggccgaggcaggccggatcacaaggtcaggagatcgagaccatcctggccaacatggtgaaaccctgtctctactaaaaatacaaaaattagctgggcgtggtggcaggcacctgtagtcccagctactcgggaggctgaggcaggagaattgcttgatccagggagtcagagcttgcagtgagccgagatggcaccacagcactccagcctggcgacagaacaagactccatcttaaaaaaaaaaaaaaaaaagtatgatggcatgcacctacagtcccagttacttgggaaactaaggtgggaggatcacttgagcaccggaggttgaggctgccgtagtgagccacaatggagccactgcactccagcttgggtgactgagcgagaccctgtctcaaaaaacaacaacaaaaaagacactgagtcttgcccagaaactatgggaaacaagtgaggtgcatggatacttaaagtacatagtaagatactatgctggccgggtgtggtggctcatgcctgtaatcccagcactttggaaggctgaggcgggcggatcgtgaggtcaggagttcgagaccatcctggccaacatgatgaaaccccgtctctactaaaaatacaaaaattagccaggcatggtgatgtgtgcctgtaatcccagctacttgggaggctgaggcaggagaatcacttgaacctgggaggtggaggttgcagtgagctgagattgtgctactgcactccagcctgggcaacagagtgagactccatctcaaaaaaaagaaagatactatgccagtgctatcagacagatgaaacacttcagcctggtgtgcccaagtaaggctttctggtagatgatgcctgaactgagtcctaaaggacggagtaaatgttcatcaggaaagagggagggaaagggtattgtagacagtgtagccagtaaaaaagacttggaaatgtgagcatggagtgtgaatccggtctaagaagaggagtaagacgaaaaaagactggctgggcttggtggctcacacctgtaatcccaacaggttgggaggccaaggctggtcgattatttgcgtccaggagttcaagaccagtttgggcaacagggcaaaaccctgtctctactaaaaacataaaaaattagctgggcatggtggtatacgcctgtggtcccagatactcaagaggccgaggtgggaagatcacttcagcccgggaggcagaggttgcagtgagctgagatcacaccactgaactccaatgtgggtgacagagtgagaccatgtctcaaaaaaaaaaaaaaaaaaaaggctgggtgtggtggctcacgcctgtaatctcaacactttgggaggctgaggcgggtggatcatgaggtcaggagttcgagaccagcctgacccacatggtgaaaccccatctctactaaaaatacaaaaattagctaggcgtggtgacgtgcctgtaatcccagctactcaggaggccgaggcaggagaatcgctttaacctgggaggcggatgttgcagtgagccgagattgcgccactgcacttcagcctgggtgacagagcgagactctgtctcaaaaaaaaaaaaaaagaaaaagaaaaacagaccaaatatgtaggcaggatgctgtgttatgaggtttggattttattttaaggctaattaataggaggagcaattgaagggttttaaggaagtgattgacatgatgagatctgtttttagtaagattaccggctacattgtagaggctggtagagccagtaaagaaatccagttgggcgtggtggctcatgcctgtaatcccagcactttgggaggccgaggcgggcagatcacgaggtcaggagttcaagaccagcctggccaatatggtgaaaccacatctctactaaaaatacaaaaattgccgggcgtggtggcacgtgcctgtagtcctagctactcgggagtctgaggcagaagaattgcttgaacctgggaagcagaggttgcagtgagctgaaatcatgccactgcactccagcctgggtgacagagcgagactccgtctcaaaaaaaaaaaaaggaaatccctaagagaatccatgtattggtggaaaggaagggtagaaaagataattaagagatggaaatggcataactttgagatgatgattaagtggctaaaaagaaggataggctgggcacggtggctcacatctgtaatttcagcactttgggaggccaaggtgggcagatcacttgagttcaggagtttgagaccagcctgggcaacatagtgaaaccttatctctacaaaaaatacaaagaaattagccggacttggtggcgcacacctgtagtcccagctacttggggggcttaggtgggagaatagcttgagccccagaggcagaggctgcagtgagctgaggtcatgccactgcactccagcctgggcaacaaagccagacactatcttggggtggaggggaaaaagtcaaggataaatcccaagtttctggcttagtaccattcattaagagcagaagaagagaactaggtcagttttgctggacagtgttgagtttgtggcatatccaggtaaaggtaaagatatccagagtgcagctggatatatagttgtccctcagtatctatgacggttggctccaggaccccctgtgggatactgaaatccatagatgcttaagtcccttatataaaatagtgtagtatttatatataacctaggcacatcttcttgcttgcttgtttagttttagttttttagatacagggtcttgctctgtcatccaggctggagtgcaataactagattgtagctcactgcagcctagaactcttggattcaagcaatcctctcacctcagcctcttgagtagcagggactacaggtgggcaccaccatgcctagctagttttttaaaaatctttttgaagagatggggtttcactgtgttgcctagggcaactaactcctggcctcaaaacaatcctcccacttcagcctcccaaattgctgggatgagaaacttgagccgctgcacccagcccatctcatatacttcatctctacattacttacaatacccaatacaatgtaaatgctatctgaatagttgttatacggtattcgggaataatgacaaaaaagtttgtacgtgttcctttttttctccccaaatattttcagtcctttggtgactgatccatagatgaggaacccacagataatggcaagccaacggtatccatccagatcacaggggagggatttggcctggtgatacatgcttgagagtcacttgcctacagattatagcagaagccatctgatggaatgagatgatccaggaataatggggaaagcaagaagcaacctttaaggatcagggaaaggaatactctgaaagaaagctgggaactaggaggaaaatgaagagagagagttctatgctggaacttaaggaagggtgttttaataagggggacatggtcaacggtgttagatgctacagagagatatgaactggtggtgaggaatttgagagtagaagtatgccacactttcaaatagacaggctacaacaggcagaagctaggatacataagacaagaggaagcatttttaaagttgggtgagactttagagatgggcaagccagcagtgaaagaggttaatgataaagatgagaagacagattggagatggagaaagatttctgaagtggtgagaggtaataagatacaatgcaaggtacattccattaacctgcaaaggaggatggataatctattctgaaataagaaggtagaatggaacagtggaatcaggtttggagggaaatgcttaacatgtttgcatactgttctcatctttacatactttttcaacaaccctgcaaagtaggaggtatgatatatcttcagttcataaaggaattgatagcacagttggtaagtaaatggaagattagggtttgagtctaagcctatctgcctcccaagttaataatctttctgctgcacagtttcagtatccccagtctgtgaaattgggataataacagaaccagaggccaggcgaggtggctcacatctataatcccagcattttgggagaccaaagttcaaggatcacttgggcccagaagttcaagaccagcctgggcaacatagggaaacctcatctctagtaaaaaatttaaaaatttgccgggcgtggtagcgcagaccagtggtcccagctatttggaaggctgaggcaggaggatcacttgagcccaggaggttgaggctgcaatgagctgtgttcacaccactgcacaccagcctggggaacagagtgacaccctgtctcaaaaaacaaacaaaacaacaacaacaacaaaacaagcgtttaaggatttaggaaggtaatgcttccaccacagggcttgaatgaatgaatgttaacttcctcttacctattcttgtttttttttttttgagatggagtctcgctctgtcacccaggctggagtgcaatggcgcgatctcggctcactgcaagctccacctcctgggttcacgccgttgtcctgcctcagcctcccgagtagctgggactacaggcgcctgccaccacgcctggctaattttttgtatttttagtagagatggggtttcactgtgttagccaggatggtctcaatctcctgacctcatgatccgcccgcctcagcctcccaaagtgctgggattacaggtgtgagccaccgcacccagcccctcttacctattcttttggaggagaaaaaatcaagaagccttcccaggttgtaatttcccaagctgttttttttgtccagctcctctgcatatctgacaaaatttcccatagcatctttcagtaacacttttatcttgctcatacttcccccatcatcacaattacacttatgttcacagggtctctggggcttgctgtcattccttcatctggccaaaaaatgcttcttcctgaaagccccgagtgaagcattctcctggttctaagtacagttcattagctccccggtttcccttttctcctccttcaagtacacagataactaatctaaaatagggccttcccagtccgaaccgttggtatcaagtacacaggagtgccatagccttgaatctaattacctagtactttgaataaatctggaaagactagtatgcttgcaagatgatacaaatgtataaaataaacatttaaattatacagaatttttttttttttttttgctttgcttgtctctacacagccaataatttctgaagatcagacagcagccctgatggcccatctctttgaaatgggattctgtgacaggcagctgaacctacggctgctgaagaaacacaattacaatatcctgcaggttgtgacagaacttcttcagttaaacaacaacgactggtacagccaacgctattgaggagtgaccttgtattaaataactgcctgctgctcagagatgatctttattctgtcattggggtatgggatagaagcccttgcttatttttaatctgatgaatctgtatagagcccatcgttgagttaccaagacaatacctgctacagtattttggggagcaaactaaagaccagaacttaaattttcactttagacattggatgaatagtatgaagacagtttttcagttgatttggataaaactattttagtgcattgacaagtgtaacttcaacttcatatagaaccatttttctttctgcttttattgaaactgagtatttttctttggctaatgtggattttttatggggatatctgttaattttcaggttttgaaagacattaacctcggaagttgtttttaagaattattctcataattcttattctcataatttctgtaatccacctcaagcttcatagttatttggcattgaaataacacccagagcatgatagaaatgttgttactcttcctctctcaaggagaaagtaattttcctgcaatacttaataattggcaccgttgctttctaaagactccatggtgcattcaagagtatccaacttcaagggaatctccgcatttcaatgaaaggaggaagagtgtgctgataaacctaccagcacctattgagcaatgtctattatagtaattttgcatacatttttatttaagggaaaaaatataggtattgtgaaatattttgctaatcttatagaaaaggaaaaaatcccgttatttaaagggaaaagtaaatttaacagttgccttttttcttaatgtcagggcagatcttattttacagtacagtgggggaaatagaaacatgtgaaaggcaaaaggcaggctcctaaattaatgtcagtgaagttcagggtgggcaaatgagtgtgtgtgaggtataggaaatgctgatgacttctttaatgcttgaagtccgttcacaggtatctagccctagaatgcctagaacaggaagaggcagctggtgttctgcaaaacttggacaggggcaaagttgctgaaaaagttttggtttaacccgaagataagtggaaaagagcttgtccatgaacccaggttctcactctgtttacagaagtgtgttgagtacagttggtgaaggaagaggtaacaaaaaatgctaaatattttatccatgaaaatgacttccagaaaaggaagaatatgaaccccagaccgaaggggaaaagatagttaatagtattatctaacctggttggtatttgtaatgaatggtgattttaattagtcattagccataatgatgtttatttacagtataactcctgaatgctacttaaataaaccaggattcaaactgcaagccagccaggccgttcattatttaaaacgttttaatcggggcttccgggtagaaggtggagcggcagggtgtaattgggttgatgggtgggacctgtcttgaccatcggagttttataatcgagggccaggagggcccgggttgctctcctggttatgtatgtacttgtacataaccacctaaagaatggtgaaataaatgttcttggaaattcctacccggactggctagtccttgcggaagcagcgtccgggccctcgggtaacgtttgaagagctggcagcgtctcaggctgctgcgtggcgaaggggcggaccgggggacgggggggtgggcccttaggggctggggcgggacttccctgggcactgagtcaaagcttgaggggagtgttcgctcccgcattttcgattccactctcttccgtttctgtcgctgcagtcgtccgcgggtaaggccctccctagaccctttatacctactttacctttcggaggtcaagacacctcctgttgccgcctcctcgcccaacacacaggcgccccccgcacgggtaccaagcttgactaacggcctctaggggtgtgtggtgggacttgaaatcctcccttaatgaagtcacaccttctccgtccgcttccacccggtcggcccatggcagagcccccatgtagcccaggaatcggcttggcccttcggggaggtcagcgtccttactatccccactctccagtgcggcacattcgttcccctaggactccggccggttgccggccccaggcggtgcttctccccaccaccgcccagctcagctcagcccagcccagcccactctgcccttagaggcccttctccccaaagacgcactccagaagtctcgccctcgtgcggctgaggagcctgggatcccagacctgaacaaggtgagcatccctatattttagcccagaaagatctgtgtggctcacttgccggcctcgttctgtcacacagagtccagatttagccttgagttttcctagtgaaagacagaccctggtatcactatgaccctcctcaggctttcttaccccgcctcagaaagcagtgaggtgtctgctttctcccagggcttctttagataggggtcttaaccacacctgtgaccagtctggcctcctctctccttgattcaaagaatctcttttctgccctatccaacttccttcccttaaactgaatgacagctcagcaacttttccagagaaaaattaaatgctctgacaatcacttatggaagttccttaaagtgaagtaacttctgcttttcttttgttttcccttttgtaggcagattggtctcttttaaaataatgaaaggagtcgaaatgcattgagacttctgagagtcccatgtgaccacccagtttttcacatcctatcttccttaggcttgagcttgcttaaactgtggtgaagctccttgccagtcttgagaacttcaaaccaaaattacatctggcgtcagtgctaacaagcttagcactgaactttggtcttttctcattagtgaaacccccgcccctgaagaatgggtaagacgttttcccagctgggctcttggcgggaggatgagaacaagtcaatcctgtcctccaaaccagccattggcagcaaggctgtcaactactccagcaccggtagcagcaagtctttttgttcctgtgtgccttgtgaaggaactgctgatgccagcttcgtgacttgtcccacctgccagggcagtggcaagattccccaaggtgagtggcccaaggctctggaaatagcctggaatccagggaaagttcttagcctgttggcctggggcagcccctctgagtctccttggatggggttagatctgctcccagctcttgacctcccagtctcaggctggccagggagatacttaactatccttgggttccctgcaaaaacctgccctccttccctggttgtattctccagccccttgtgggaaagaaggattctagccactgtgcttctgagcaacactgtgtgtcctaggattcattcagttcaggaagttacaaatgaactttccaaagatgctgggcatctctgatttgctggtgactttcagagattcttcatacctattagtggaaatctcacttccattctagagatggcaaagctgagctgccaactttggtagcagagtccagtgcttccagtcctgctctggggcagatgtggcatgtttctaacattgctctatggtgtgggtggaggcgtgcttctgggaagctggcacagtaaatatttgtcacagttgcatcttggccctccctctcaccttctctctctctagagctggagaagcagttggtggctctcattccctatggggaccagaggctgaagcccaagcacacgtaagccccccttcctcccctagcttcacaagccattgcccctgggggctgctccctttgtctcccctgttttgatctcccttaatttcttcctattagttcttccatagaaagcctgagcctcagaggtaccagctccttacgtccaaggattttttcctgatttagaagctcctggaccgggtgtggtggctcatgcctgtaatcccagcactttgggaggccaaggcaggcagattacttgagctcaggagttcaagaccagcctgggcaacatggtgaaaccccatctctatcaaaaaaaaaaaaaaaaagaaaaaaaaaaagaaaagaaagaaagaaagaaaaaagcagcagctgtgggcacagcagatgtcacttgaggccacctggtgggcttccttaagcatcactgcttccagaaagcatggccccctctccaagacaggaaggatctggtagctctgcaagtcctcccaggaaggagggaacaagcatgtggccctggctgcaattgatttgaaaatgttatttttcttaagcacctcccttgctgaggcagttcagatttgcttgtttttcttctagtagagatgaaaaacctattgtccgctgttctgggatacttcagaacctcaggcagacctggggcctactgtgtttgtgatctgagtccatctgacatggagctccctcaacctcctcccaaggtcctggtgtcaacctgggagtcaccaccaagccgaaccctctccgccaccccactataccagaattagaaatcaggctgggcgtggtggtttatgcctgtaatcccagcactttggggaggccaagacaggcggatcacctgaggttaggagttcaagaccagcctggccaacatggcgaaaccctgtctctactaaaaatagaaaaattatctgggcgtggtggcagacaccagtaatcctagctacttgggaggctgaggcaggagaattgtttgaacccaggaggtggaggcttcagtgagccaagatcatgccactgcactccagcctgagcaacagagcgaggcctcatctgaaaaaaaaaaaaaaacaaaaaaaaaccctgtaatcccagcactttgggaggccaaggcgggcagatcacgaggtcaggagtttgagaccagcctgaccaacatggcaaaaccgcctctactaaaaatacaaaaattagccgggcatagtggcaggcacctgtaatcccagctactcaggaggctgaggcaggagaatggcgtgaacccgggaggtggaggttgcagtgagccgagatcgtgccactgcactccagcttgggcgacacagcaagactccatctcaaaaaaaagaaaaaaaaaagaaattagcagtgcacatcataagatactaacaaagtactatctctttaatgcatatctgaattttgaattggatggatggtgtcctgttctgaatgttaaaattcagaacttccaaatatggacttatttcttctagtgataataactagcattcattgtgcttttgccatgtgcagggacctgtgattagtattttttcatatattagccgataacaaattctgtgaggtcagtacaattatctgccttttaccaacaaggaaactgagacttaaggaggctaagtgggctgctccatgttattgggtcaatgggaacagagatctgggagtggaaaccaggctgcctgcctgccaatcctgtgctcctactcattccgggccacatctggggagctaaatgttgttggggtagtgtgcaggggaaagctttgtatatggagaggagtgtctgaaccccctctccgagtttccttggtgttcagacttttccattcctccatcctgggtcctgctttcccacaggaagctctttgtgttcctggccgtgctcatctgcctggtgacctcctccttcatcgtctttttcctgtttccccggtccgtcattgtgcagcctgcaggcctcaactcctccacagtggcctttgatgaggctgatatctacctcaacataacggtgggtgggtgcccttggctccaaaccccccttcctagcaatacttcgctgtaacctttgtccagtgttatgaccctgggcatgggaagccagagatcttatggcacccagagggtgttgggagcctgaagagaagtaggagcaaccatgagctccatgacagatggtaaggattgggactctacacagtaaggggtcagaatccgggccagataagtaaaccacaggggtggagtggggtgacagtgcctgagactctctggatggacaggactgaatggaaagaagctgtacaggatggacctggatcctgaggcagcttaacttcgtaaagttgacccctcaccattcaatgcccctccaaggggctcccagttttcatcctctgcacctgaagcttgtcatggtagatggggctcaggccagacagccaggcttttgcaactgtttggcttttcctaaggatgggccatcttcactcctcccttcccttgtcttcatccccagaatatcttaaacatctccaatggcaactactaccccattatggtgacacagctgaccctcgaggttctgcacctgtccctcgtggtggggcaggtttccaacaaccttctcctacacattggccctttggccagtgaacaggtgactcccctctccctggccagccctgcccactggtgtgtggatgtgtggtagtgggaaaggggcagctggagttggggctaaccctgtgcccatttggttgacagatgttttacgcagtagctaccaagatacgggatgaaaacacatagtgagtaccccttgatctcttctcccctagccacttgcctggcttagggacccaattaatacccaccagctttcctgattgcttagcaaattcttcagccagcatctggcctgccctcccatggccgagaatgtaataagcaagggttcagggtccccagcctctgcttgtttggaccttgattagaatgaaaaacaggctggaatttggttaatctttacaatatgtgaccttgggctcttcagcctgcattgctgaggaagaagaatgttttgtctgtctcctgaatgggggtccagcatgtgcctgggccaagtgagtggaggtcagagtgatagtgcagccatgctgctacactcacctgaagggtgggaaggggtgggagtgacattttgggggcacctgatggaaggaaagagttctgtggggtaaggaaactgggacctgcaggcatcttctgagctgacaggctgctccatgtgacacgtggtcccacgttctcttttcttctctctcagcaaaatctgtacctggctggaaatcaaagtccaccatgtgcttttgcacatccagtaagtagagcttggagctctggtatccctgctctcacttctgacttcattctcactcagctacacctcatgggcagagagtcttccaagctgaccccatgaatctttgttggctcttgggaatagcaagtctagccccttttctgagtctcaccttgcctataagttattaggggcaacaggcatagggctgtctggaagctgctggaaaacaggtggggcagctgtcccaggtaccttggcagagtggggagccagagggaagggcaaatgagggagctccccgctccccacccccagacagtataatggggccagagctttccttttcctcccagccatggcaacaaggcctgcttcctctccaggggcaccctgacctgttcatacctgagccattcagagcagctggtctttcagagctatgaatatgtggactgccgaggaaacgcatctgtgccccaccagctgacccctcacccaccatgacctgtctgctgtccctgtactccaggcacctgcaaccctggtctatatctcccacaactccctggtgactaaggaaggactacagaggctttgccaaaggagaagccctgcctcatcacacccttacctcccaccccctcagcacaggaagcttgctttgaagttaacttcatacacacacactcatatcctccagtttcccccagattctttcaggggctgccatcagattctgcccttggttagttttttgttttttttttggtagagacagagtctcactgttggtccaggttggttttgaactcctgggctcaagcgatcctcccttcttggcctcccaaagcacttggattacagatgtgagcctgtgcctggctggtctttcttgaggaaaatctgacctggcattttcttgaggcaccttagattccctggagtggcacctggcctttctgtactgagcacctggtcagtctgaagggggcatttcaccccagctccatcagggctggctgtcccgtctgaatgtggagagagctgtagttttatctggcttttaaaacatggacctgccggctgggcgcagtggcttacacctgtaatcccagtactttgggaggccgaagtgggtggatcacttgagggcaggagttcgtgaccagcctggtcaacatggtgaaaccttgtctctactaaaaatacaaaaattagctgggtgtggtggcatgcgcctgtaatcccagctactcgggaggctgaggcagcagaatcacttgaaaccggaaggcagaggttgcagtgagccaagatcgtgcaactgcactccagcctgggcaaaagagcaaaactttgtctcaaaaaaagactcttttcaagttttctaccctctgataagaaaatttggggatatccagtgccatctccaaggactttcaggggatcatagatgcttttctgtgcctatctgctttgaccatgtgaaaaagtgatagtctgcttctctctggtaacttgtctgccacccatctgatagtaagattagccaaggccctttagccctctgtcctttctggttattgactgtccctggttcctaggaagacagagttgttctccagctaaagcgtctcctctctataaagtagttttactattcttttcatagcaggagccaaaatagtagaggaggggagagaggcacctggcactctgcgggcctgcacaggaaaaacagagccaaagacagaatcattgtataagatatttattaaaggagagcctctaagtccacatcctgagcccatgtgagtggacacaggtaggtaaaacggtgggtccagctgctgtcatctgaaagccttcaggagatgaagctatcagtatccagctgaaggctgctgggttctgttccaccaccaccttagcaccagggccctctctggtcccagaggcctcatctctccttgggctttgacaatgtggagcagcacatcagcagggactggtctagaccctccctttcctgtcacttagctggagctaagctccagataacccctaggttcccactggctcctagtagaaatagtttctgtactttagcagaacaggaaggatatttgttcattaaaggtggcttggtcttacagctgggtgcagtggtatatacctgtagtcccagctactcaggaagctgaggtgagaggatctctagagcccaggaattcaagtttaacatgagcagcaacattagcaagaccccgtttaaaaaaaaaaaaagagctgggcgtaatggcgcacacctgtaatcccacctactcaggaggctgaggcaggagaatcacttgaacctgggaggcagaggttgcagtgagccaagatcgcaccactgcactccagcctgggcaacaagggcgagactctgtctcaaaaaaaaaaaaaaaaaaagatggctgtctctttatcattcagacagaacgatgaacacaggtgagcagggaaagctaattttgaagtaggatgcatggagagggagaagtggtgacagaacttggtaactagctggctgggggaacgaggggaaggaaggagactgctgtctccaagctgaggtcagggtggtgttggcaagagcgcaaaagtccagggaagccaggctggagctgctgtgtatagactgccaaatgtgaagtatttatattgtattcaataaactatacttaagagtgttcaaaaaagtctcctgggagtgggaagggagctagtggatactccctatttcacaaacttttctttttttttttttttgagacagtttcgctctgttacccaggctagagtgcaatggcatgatcttggcacagtgcaacctctgcctcctgtgttcaagtgattctcgtgcctcagactccctgagtagttggggttacagacatgcaccaccacaccaaattaatttttgtatttttagtagagacagtgttttatcatgttagccaggctggtctcaaactcctggcctcaagcgatctgcccgcctcggcctcccagagtgctgggattacaggcatgagccactgcacctggcagaaactgtttccttaatgttctaacgggcagcaaggtttcttccccaggcctctgagccactgatgacatatcctgcccttctgttttccgtgagattgctcacaggacctcactctccctcttgctcccattgtgtatctctaaagtctcttccaattttactattcctgttctgtgccaccaccatcccgttatcttccccagctgctctcatcaggaaatttcgtgggttgcactgaaacggccccttcagaccaaaggcaatgctatgtaggctaaaatgaaatacgcagctgatgcctcggacggggcttgtgattgaggtgactgaggcagcctttctcagcatggaggaagaaaggctttcccagggcttgcaccttcctgaagtctaacacccagggcccccagccctacccactccttcaccttgggctggtgaacctctgggttgtctctgctagatggagaggctgagagccaggaagggagagggctgtgggttttagaaggcaagactccctccccttcccagggtcaggtgtcatgttcctgaggctatagcctccgtttcctccaagctctttcgctccatccctgcctccattgtccatttgacagctgagtgcccactgtaggccagccattgcactgggcttggaggtggggagcatcactgcctgccaccactttctgctgctgcaggcctgctctgatgtgatgcgacccctccttccccaggctatatctcagtaagcatgggcttgggggaatgggtgatggctccagtgacagtcataaactgaagccccccacagacttatcactgctgaatgagggcaggtagtgatagtagtaggagttgcatacttgggggggacccaagacccagttctcccattggctttgcctagagaagcataaacttgccttccactctctttccaccctctccatccccttcgtgagtcctcctgccctcttcctctcatccctgtctcataaagctgtccggtcccgtgattcttcccaggaaaaaaattacattttattcctggcagcctcctcttctagagtgggtggcttttggagtggagatattgctggatgctgagaagatgtggttgctcatctgcattttggggatggccatggggtcctgggttcaatctctggatcaccactgctgtatgtaattggtagactgagaagagggagagacaggaaacaaaacaagttagcagcttctggtttcagaacattgtgtgaaatcccttgagtccagaggaatcaaagtgaaatgtagcagcccactcttcatcctagaagtgctagcatcagtttctttcatctgttgcacctctgtcagagacacctttccaatgccttgcacaattgcacaattatatattcttgttaagagttgccatccaggccaggcgtggtggctcacacctgtaatcccagcactttgggaggccaagacgggtagatcttttgagaccagcctggccaacatagcaaaaccccatctctactaataatataaaaattagctgggcgtggtggtacatgcctgtaatcccagctactcgggaggctgaggcaggagaatcatttgaacccgggaagtggaggttgcaggtggagtgcagctgagatccagcctgggtaacagagtgagactgtgtctcaaaaaaaaagaaaaaggttgccatcctgagtttgatagcctacaatgagctggactccaagctaagtgcttttaatgctctttcctctgtctgtctgtctgtctatctcactcttttacccaggctggagtgcagtggtgtcatcctggctcactgcaacctccacctccaggggtcaagtgattctcctgcctcagtctcccgaatagctgggactacagatgcgccctaccacacctggctaattttttgtatttttagtagagatggcatctcagcatgttgcccaggctgttctcaaattcctgagctcaggcaatctgctcacctcggcctcccaaagtgctgggatttcaggcatgggcccctgcgcctggcccctttcctttattaataattgccatattcagtcctcatgccacctctgttgaggaagttgtatcatctatcattttatggatagcgctgagcaataggccatccatacccaggcattttttcctttttttttttttttctttcagggagggtctcactctgttgcacaggctggagtgcagtggtgtgatcaccacttacggcagcctcaacctctggtgctcaagcgatcttcaccttagcctcccaagtagcttggactccaggtatgtgccaccatgcccagctagttttgtttttttttttcgttttttttttttttttaaacgaagtctcgctctgtcaccaggttggagtgaagtggcacgatcttggctcactgcaaccttttcctcctgggttcaagtgattctcctgcctcagcctcccgagcagctgggactacaggcacatgccacccacccagctaatttttgtatttttagtagagatggggtttcgccatgttggccaggatggtcttgatctcttgacctcatgatctgcctgcctcagcccctcaaagtgctgggattacaggtgtgagccaccgtgcctggctacccagctagtttttaaaattttttgttgttgttgagatggagtctcactctgttgcccaggctggtctcaaacttctgggctcaagcgatcctctcaccttgatctcccaaagtgctgggattataggcatgagccccacacacttggctttttttcaatttttttcaatttttttcaatttttttttttttttggagatgtctgaacctgaactcctgggctcaagcaatactcctgcctcagcttcccaagtagccaagactactgcacccagcttcctacccaaacatttttaatggtggcaaagaatagaggaatagaccatccagaagtaatttgaaataattctagtctcctccccttactcctgctaaggaggtttctctggactacacacacacacacacacactcacactctctctctctctctctctttctttctgtcacccagagtctgtctttcacagtctgtgtccctatcttaccttgagttgtgaatacccagtgtttctgatggggctagattggcatgggttcatgagacctgatgatgaaacaaagtacaggttactcatccagcagttttccaaggatggaatactgcaagcctggagtgcttgtgtctggtgacccagggggtgatgggggtgcagtgaggacaggctcctacctgggacagggcacagactgagcccttcctgaagattctcaactaggaagctgtgctgtggttccctgttccagacctcacggggctcagtatatctgttaataagcctacaactcatgtcccaccctctgatcacccccacctcctctgtcacgcttactctggaagaagggccgacagcttctcaaccactctctgcagaagttggaaggctcctttgcagccgtaggttggcattaacccacccagggggagttgaccagcaaggcattaaaggccgagggtacttgggagagtcagagagggtagggtggtagatatggattctacactacagggccgggatggaagcaaagggctcctctccttaccacctcccactcccaggctccagtccagagtctgtaaggattttctgcccaccctggaatctgttgttgatacagagattgccctccagcttagtagatccccgctgaagtaggctggtgacctggcctttgggaatcctggagattgcatttggaggtgtgctgagtacaacgggcttgagcacttggttgtgttggctgaggtggtggctgtggttgtggtggctgtggccctggccacacctgtgcctgtggcaatgttgatggctgtggtggtggctgtgatggtggctgcactgatggctgctgctgtgatggctgtggttgctcctgtgatgtccacaatttcgccactggtggttgcggcacatttaacttcttatgtggctggagtttttcctccgattgttgttcttcctcctggtgattcttcagttcctggcaagaagcccccgggcaagtggcatcatcctctccccacccaatcacccatctgccagagaaacttcagggaacaaggcaagtgagtagagaagtataggtggcagtggtctctgttccctagagctggaggctgaaattgggcctacgctgtctgcctcacccactgtgacacccaagaacgatttctgggtggcacagccccagcccaggaaatagcactctctctgagcacctgcttcctcacttgagagctcagcactgaaagcagtttttagtgctggaggataaagagtaattccctgcaaatgtcttgtgttttgttttttagagataggttcccactctgtcacccaggctggagtgcagtagcacttttatgactcactgtaatctggaactactgggctcaagtgattctcctgcctcagcttcgcaagtagctaggactacaggtgcacaccaccatgcccggttaattttttttttttaatagagacagggactcattatgttgcccaggctggagtgcagtaagtggtgcaatcttggctcactgctgccccaacctcccaggctcaagcgatccttccacctcagcctcctgagcagcttggactaaatgcatgtgccaccatgccttgctaatttttaaattttctgtagagacagggtccccctatgttgcctaggttggtttggaactcctagcctcaagcgatcctcccacctcagcctcccaaagtgatttttttaatagcccaagggtgcttctaaaccttacaagtgctttgaaatagcagtgtcaaataaaaatataattcatgctgggccggacgcggtggctcacgcctgtcatcccagcactttgggaagccgaggcgggcggatcacgaggtcaggagttcgagaccagcctgaccaacatggtgaaaccccgtctctactaaaaatacaaaaattagttgggcttggtggcaggcacctgtaatcccagctactcaggaggctgaggcaggagaattgcttaaacccaggaggcggaggttgcagtgagccaggatcatgccactgcactccagcctgggcgacagaatgagactccgtctaaaaaaaaaaaaaaaaaagtatatatatatattgcatgctacatgtgtaattttaaattctctttctttttttcttttttttttttgtttgagacagagtctcgttctgtcccccaggctggagtgcaatggcctgatcttggctcattgcaacctctgcttcctgagttcaagcgattctcctgcctcagcctcctgagtagctgggattataggcatgtgccaccacgccaagctaatttttgtatttttagtagaggcggggtttcaccatgttggccaggatggtctcgaactcctgaccttgtgatccacccgcctcggcctcccaaagtgctgggatgacaggcgtgagccactgcatccagccactaaattttctaatagccacatagaagaagaaatagggccaggcacagtggcacatgcctgtaatccacgctttgtggcactgagacaggaggattgtttgaagctaggagtttgaggccagcctgggcaacatagtgagacctggtctttacaaaaaattagctaggcatggtggtgcatgcctgtagtcccagctactcaggaggctgaggctggaggatggcttgagcccaggagatcaaggctgcagtgagctatgaatgggccgtcacactccaggtttggtgacagaggaagaccttgtctcaaaaaaagaagaagaagaaaaaacaagtgaaactaattttaattacttgtatttatttatttttttgtgtgcaacagggtctcactttgtctcgcaggctggaatatagtggcgtgatcacaaggcttaccgtagcccttgacctcccaggctcaagtgattctcccactgcagcctcccgagtagctgggactatgggtgcacactaccatgcctggctaatttttctatttgttttagagacggatttcaccatgataccaggctggtctgaaactcctgggctcaaaggatcagcccgccttggctcccaaagagctgggattacaggcgtgagccactgcacccagcctaataatatattttacttaaccccatgcatccaaaacatcaatatgaacatatcagtgaagtattttatattctttgttttcatactaagtcttcaaaacctagcttgaatttgaaacaacagcacatcttaatttggacactaaattttcatcaaaaatatttcattgatttagatttcataaatttacagttgaaaaagtagatgtacatatccaaattgtcccaaacatgcttaaaatttttccagtatgtatgttgttttaaaatatttatatttttgttgttgttgttgttgttttttaagatggatttttgctcttgtcacccaggctggagtgcaacggcgcgatcttggctcactgcaacctccacctcccaggttcaggcgattcccctacctcagcctcccgagtagctgggattacaggtgcgcgccaccacgcccggctgatttttgtatttttagtagagatggggtttcaccatgttggtcaggctggtctcgaactcctgaccacaggtgatccacctgccttggcctcccaaagtgctgggattacaggtgtgagccactgtgcccggctgggagcaagactggagcaagactccatctcaaaaaaaaaataaaataaataagtgaattaattaattaaaggccaggcatggtggttcacacttgtcaacattttgggaggctgaggtgggaggattgcttgagtccaggagttccagaccagccagggcaacatagtgagaccctgtctgtattacaataataaaatcaaataaagtttttaattttttttttgagacagagtctcactctgtcactcaggtcagagtgcagtggcactatcttggctcactgcaacctccacctcactgattcaagtgattctcatgcctcagtctccccaggtagctggaattccaggcaagcgccaccatgcctagctactttttgtacttttagtagagaccaggtttcgccatgttggccaggctggtcttgaactcctgacctcaactgatccacccaccttggcctcccaaagtgctggattacaggtgtgagccaccatgcccggccaaaataacatttttaaaaactaaattaaatttatataacactgaccgggcatcatggctcatgcctgcaatcccagcactttgggaggctgaggtgggtggatcacctgaggtcgggagtttgagaccagcctcaccaacatggagaaaccgtgtctctactaaaaatacaaaattatctgggcgtggtggcgcatgcctgtaataccagctactcgggaggctgaggcaggagaatcacttgaacccgggaggcagaggttgtggtgagccaagattgcaccattgcactccagcctgggcaacaagagcaaaactccatctcaaaaaaaaaaaaaaaaatttggttcctcagtcacactccaaggctcaatatagcatacaggctgggggttaccctattggacagaacatctttaaacctcccaggcctagtacccttgccttcccctagactattacaagagggaaattgagtcagctgatagtggtccccccaacacagacacagtctatctgagagaacgccaaatgaccttgctttcctcctacccccagcaaacagcattcaccaaatagtaggcagcttcctagggatctctctccattctccattcccttcctgctccagagaggaccctgaagaacccagcctatcccatgcacctgttctttctgctgcagctcctgctgctgctgggccatcagccatctccttcggtccaaagccatctgccggcgccgggcctcccagtggtaggcactacccatgatagtgggatggtatgaggccccaggtgggggtggggacaggcagagcccactgctcccaccacctctgtctcttcccactcagacccctctgcctataactggaaccacctcacaatgtggttactgccagggcaactgggcaggccccgcctgctttgttgagagagggaggcatttttcccaaggctcccagggaacatctgcaaagtacctttctctcctgggtcctgatcagatagaagaccttcccaccttagctttgagtctcaatgggccccatggacaattcagcagtaaagtcttttctctctggcttctttcccccattcttcctcagagggttccagcatcatcatctgacccttcctctgctcatctctccccacttaggtctccggaattacctttttctccttaatctctcctctctccatctcccccataaatgtctgtgctgagtcagaatgaaagaaaatacaaaatcctactaagcctcactgaggtctgagcccccagaacgcaaaggggcttcttagaaaacaccctagctctggagatttctaattctggactcaagcctagcgtctacctcttaattttattttcattttattttttattttttgagatggagtttcactcttgttgcccaggctggagtgcaatggcgcaatctcggctcactgcaacctccgcctcccaggttcaagagattctcctacctcagcctcccaagtagctaggattacaggcatgcaccaccatgcccggataatttttgtatttttagtagagacagggtttctccacgttggtcaggctgatctcaaactccagacctcaggtgatccgcccgcctcagcctcccaaagtgctgggattacaggtgtgagccaccacgcccagcctgggactgtgcatttaagatcaccccaagtggctgggcacagtggcctctgcctcctgggttcaagcaaacaaaaagaaagagcctaggcaacctagtgaaaccctgttcgggctgcggcctatctgtaccccagctattccagaggctgaggcaggagggtggatggatgctgggaggtggatgctgcagtgagcagtgattgcaccactgcactccagcctgggtgacagagccagaccccgtcccaaataaataaaaataaaggaaccagtttgtagaaagcaggagagggtcccattgaacttcaagccttcaagctacagctgtggctggacaggttggaccagcaggctggagcagtcgccatcttggcagggatcattgaccctgatctatcatcgggaggaagaagagctgatcttatgcagggagggcaggtggactatgtgtggactctggtgatctgtttgggtgccaggtgttactcccagggccacccataactgtgaatgtgcaggaaccctgacttaggttcctggggaatgagagtttggttcccggtacccagggaaaccaccagcatcggcagaggtgatagctggggaggagcggggatttggacgagagacacaggatgagtaccgggggcagccctgtgatcaacaactgctgcaagaggggccgtttgttcgactcactagtcttctgtggctctatgcggtactaaagagcagaagacagaagatacaaaaaccacaaaaattagccgggcgtggtgctgcgcgtcaataatcccagctactcgggaggctgagatgggagaatcgcttgaatccgggaggtggaagtttcagcgagctgagatcacgccattgcagtccaacctgagcgtccgagcgagactatctcagaaagtaaagacagaattaaagtgcccagcgcagtggctcacgcctgtaatcccagcgctttgggaggccgaggcgggcagatcacctgaagtcaggagttcgagaccagcctggccaacttggcgagacctccttaaaaatacaaaaattagctgggcgtggtggcaaacacctgtaatcccagctacccaaggaggctgaggcaggagaatcactggaacccgggaggcagaggctgcagtgagccgagatcgcgccactgcactccagcctgggtgacagagcaagactttgtctctgaaaaaaaaaaaaaaaaaaaagcatgggcgcggtggctcatgcctgtaatcccagcactttgggaggctgaggcgggcagatcatgaggtcaggagatcgagaccatcctggctaacacggtgaatccccgtctctactaaaagtacaaaaaaattagccagacgtagtggcaggtgcctgtcgtccccgctacttgggaggctgaggcagaagaatggcgcgaacccaggaggtggagcttgcagtgagccgagatgcgccactgcactccagcctcagcgacagagtgagactccgtctcaaaaaaaaaaaaaaaaaagcttgggccagtggctcacacctgtaatcccagcactttgggaggcggcaggcaggcggatcaccagaggctgggagttggagaccagcctgaccaacatggagaaaccccaatctgtactaaaaagcctctgaggaagagtgggggaaagatgccacagagaaaagactttactgctgaattgtccatggggcccactgagactcaaagctaaggtgggaaggtcttctatctgatcaggacccaggagagaaagatactttgcagatgtttcctgggagccttgggaaaaatgcctccctccctcaacaaagcaggcggggcctgcccagttgccctggcagtaaccacattgtgaggtggttccagttataggcagaggggtctgagtgggaagagacagaggtggtgggagcagtgggctcagcctttacttcgccgcccgagggcggggagaccggccccgtacccgaggggacgaggggcccatgcccagtcagggaagccgaaggcctggaggggcttccgggagcaggggctggagttcctctgccaggcaggaggctggcaccagacacccggcagagggaggcggcgagggcccagcaaggattctccccagcccctgtgcctgcgtctcctgcggcttctgtgcgcggaccgtgtcctgtgctgtgtagggaatgctgcctctctgctcgggacgtggattcctttcccctcctcctcgcctggctacttctgacgcaggtcgtcaggactccgcttgggtgtcacccgtgcaggaagcctcccttagtcaagggccctcggcacccgccccatatgtgactagcagccctcctgtgtatttcatcgcgtccccgttgtttatatcagctattccactcaccacccttctgggcaaccctttatctcccgctctgaaatcccatcgctgagggctgggacccctcctcagtgcttatccctgtttccccgcgcgagtctggcgcctggcgtgtggaaggcgctcagtaaacgtttgtggagcgaagaaacgacgcaaaggtgatgagcacgacgcagttaggaggctattggcccggcgcgggggaaaagggggaaggtcgggctcggggtggcaggaccccagagggcaggggtgactgccggggtgctcttggggcaaggtgggcgtcaaggcccccagcaaggttgggataaagtttctctccgaggcacagactgccgcctgcgggctcagcatttacctctcccttcctccttcctaacgcaacttcagcggagggctgagggctctactgcgcattacctggaaaacttatttcactccacggccctaagaggtgggccttattattagccacggccagggttagggtgaggccactcctccagggcagaatttcagggggtgcccacccccccgccctaaatcattcagcaatcaacataaattatagttcaacgcaatatatcttatcttgtgggccgcaagccacccaggtgcccaggcaagagcctgaaggcacaagctgttccagtacagcaaagaaaataattagaataagaaaagttttactagagataggaaacggataggattatatctgactattattaatcattagtttgtagcatcactctttgttctattaccataatgatctctgttctattatgattaccttgggggaaaccaggccacacagagttaggagctgaagggccacagtgagaggtgaccagaagacaagagtgtgagccctcattcacgcccagagaagggccgctggagggctccttggcctagcggtaatgccagtgcctgggaaggccctggttacttagcaggccttggtctagcggtggccccagtgcctgggaaggcacccgttacttagcagaattactacgcagccataaaaaaggatgagttcatgacctctgcgggaacgtggagggaggaaaaggcctcattctcagcaaactgacacaggaagcgaaaacaaacaccgcatgttctcgctcctaagtgggagttgaacagcgagaacacatgggacacagggaggggaacatcacacgccgggccctgacggggcgtggggggcaaggggagagagagcattaggacaaatagccaacgcatgcggggcttcaaacctagacgactggtggataggtgcagcaaagcaccgtggcacacgtgtacctatgttccaaacctgcacgtcctgcacatgtaccccagaacttgggagggggtgggggaaaccaaaagagcgagggagaggcggggggggggaagagagagagagagggaaagagagagagagacagagagaggagagagagagagagagagagacagagagagagagagagagacagagagagagacagagagacggagagacagagagagagagagagaaagagagagagagagagagagagagagagagagagacaggagaaagaagaactccgggtgggtcccattcctttaaaaggtcgccacccactcgactgccaagctgagatcctaaggacctccccaaaggaggaggtcgtggccttcccaaagcgcagtagccacggtggaaacgacagcgtgccgcataagcctaccgtctaccgcccgcacatcaggaacctcaaggtacttcagggaagcagttaagttaagccggcgcgtcacaggcactcggcgtgcaagccgccccgcaggtgctaccgtctcttacctccctctacttttaggaaacacgttgtatccccggagggggtgcaccgttcctggaggtactgcaataccaggtcgatgcgtggagtggacggagcaagctcctattccatctccctgctccaaaaatccatttaatatattgtcctcggatagaggacgtatcagatattaaactgataagaacagatactacacttgatcttagccaaaaggccgagaagcgatgcgctcgccttcgcgcccgccgtcaccgtcccactctcatccacattcaagtcgcggtgagagccccagcctcgctccttgccccattccctctgtctcgtccacagcgctattgacgcccttacactctcgggctgatttcttattctctgcctttgaaaagggaaatcttacacccgtgcttcttccggcgttcccgggctttcatttcgaatttgcatgccccgccctttcacagagggcgtggcctccgccgttgactccgcccccggggccgcctctgcctgggggagccggggctccgctgggggcgacttccttgttcgtatcgagccagcgaaaagacagaaccggaagagaccgggggcgaaggcgacaggggtctgtggaagagacctgtcggcggagagcggtccacgttttcctggagaaagacgaggctccagggcaggagcgcgggctgcgctgggcctttacttcgccgcccgcgggcggggagaccggccccgtacccgaggggacgaggggacgaggggcccatgcccagtcagggaagccgaaggcctggaggggcttccgggagcaggggctggagttcctctgccaggcaggaggctggcaccagacacccggcagagggaggcggcgagggcccagcaaggattctccccagcccctgtgcctgcgtctcctgcggcttctgtgcgcggaccgtgtcctgtgctgtgtagggaacgctgcctctctgctcgggacgtggattcctttcccctcctcctcgcccggctacttctgacgcaggtcgtcaggactccgcttgggtgtcacccgtgcaggaagcctcccttagtcaagggccctcggcacccgccccatatgtgactagcagccctcctgtgtatttcatcgcgcccccgttgtttatatcagccattccactcaccacccttctgggcaaccctttatctcccgctctgaaatcccatcgctgagggctgggacccctcctcagtgcttatccctgtttccccgcgcgagtctggcgcctggcgtgtggaaggcgctcagtaaacgtttgtggagcgaagaaacgacgcaaaggtgatgagcacgacgcagttaggaggctattggcccggcgcgggggaaaagggggaaggtcgggctcggggtggcaggaccccagagggcaggggtggctgccggggtgctcttggggcaaggtgggcgtcaaggcccccagcaaggttgggataaagtttctctccgaggcacagactgccgcctgcgggctcagcatttacctctcccttcctccttcctaacgcaacttcagcggagggctgagggctctactgcgcattacctggaaaacttatttcactccacggccctaagaggtgggccttattattagccacggccagggttagggtgaggccactcctccagggcagaatttcagggggtgccacccccccgccctaaatcattcagcaatcaacataaattatagttcaacgcaatgtatcttatcttgtgggccgcaagccacccaggtgcccaggcaagagcctgaaggcacaagctgttccagtacagcgaagaaaataattagaataagaaaagttttactagagataggaaacggataggattatatctgactattattaatcattagtttgtagcatcactctttgttctattaccataatgatctctgttctattatgattaccttgggggaaaccaggccacacagagttaggagctgaagggccacagtgagaggtgaccagaagacgagagtgtgagccctcattcacgcccagagaagggccgctggagggctccttggcctagcggtaatgccagtgcctgggaaggccctggttacttagcaggccttggtctagcggtggccccagtgcctgggaaggcacccgttacttagcagacccggaaagggaatctccctctctccaggggagacagagaacgctccgctccaccacctcttgtgggaggtctgacattagccaggccggcccgcagtcatccggaggctccaacgtctgtctccctgtgatgctgtgcttcagtggtcacgctccttgttcactttcatgttcagcctgtacacctggctcctccttttaagttcttagaagacagcagtagcagaactagtaggagtaccacagtcttcgatctttctgataagtgcatagaagaaacgctgacgtttgctgtcctccctctccacctcggctaccacaaagggaaaggccccctgtccagtggacacgtgactcgcgtgacctatcgatcattggagatgactggcactccttaccctgcccccttgccttgactacaataaatagcagcgcctccaggcactcggggccactacctgtctgtctccgcgctttggtggcagtggtcccccgggcccagctgtctttcttcctatctctttgtcttctgtctttatctcttcgatctctcgtctccgcacacacgcgaagagaaaacccacagacccggtaggggtggaccctacattatctcagctacaacataatcaggatattcacgtggactactgagtctttcggtgcccccttgctgttttagttttgtcctgcggccgagtgtttccctcgcttcacgccaacacaatctccgccgccctgtcttgtcatccccattctacagcccagcacggtgtagtatggcagccgctagccacaggtatctagggagccctggaaatgtggtcagttctaatggagctgtgctgtaagtgtgaaatacacgtgggattttgacggcagtgggagcaaaattctcccaattttttttttttttttttttttttcagacggaggttccgctcttgttacccagcctggagtccaatggcgcgatctaggctctctgcaacctccgccccccgggttcaagcaattcccctgcctcatcctcccaagcattgggactacaggtatgtgccaccacgctcggctaagtttgtatttttaaaagtatgggggggggccacgttggcttgctgttctccaactcccgacctccggtgatctgcccagctgccgcctccccaaagtgttgcttgcgattacaggcttgagccaccgctcaccctggctttttttttttttttttccagacaaactctcgctctgtcgcccaggctggagtgcagtggcgcgatctcggctcactgcagcctctacctcccgggttccagcgattctcctgcctcagcctcctgggtagctgggattacaggcgcaggccaccacgcccggctaatttttgtatttttagggggtttcgccatgtcggccaggctggtctcgagctcctgacctcaggcgatccgcccgcctcggcctcccaaagcgctgggattacaggcgtaagccaccgcgccgggctctttcattctgtctttattttctgagatagagtctcgctcggacgctcaggttggactgcaacggcgtgatctcggctcgctgaaacttccgcctcccgggttcaagcgattctcctgtctcagcctcccgagtagctgggattattgacgggcagcaccacgcccggctactttttgtggtttttgtatcttctgtcttctgctctttagtaccgcatagagccgcagaagactagcgagtcgaacaaacggcccctcttgcagcagttgttgatcacggggctgccccccgggtactcatcctgtgtctctcgtccaaatccccgctcctcctcagctatcacctctgccgatgctggtggtttcctgggtacgggaacaaactctcattccccaggggcctaagcctcgtggccaggccttctcaagtcagggttctgcacattcacagttacgggtggcctgggagtaacacctggcaccaaacaggtcaccagagtcacacatagtcacctgccctcctgcgtaagatcagctcttcctcctcccgacgatagatcagggtcaatgatccctgccaagatggcgactgctccagcctgctgtccaacctgtccagccacagctgttgctcgaaggcttgaagttcaatgggaccctctcccgctttctacaaactggttcctttatttttatgtttatttatttgggacggggtctggctctgtcacccaggctggagtgcagtggtgcaatcactgctcactgcagcatccacctcccagcgtccacccatcctcctggcctcagcctccggaacagctggggtacaggtacgccccagcccgaacaggttttcactaggttgcctgggctctttctttctttgtctgtgtttgtttgttggttggttggttggttggttggtttttgtttgtttgtttcgagacggggctccggctctgccgccgggggctgcagtgcaatggcgcgatctcacctcactgcggccttctgggctcaagcgatcctcccactgtgcccggcctgaagacagcctttagagaaagaagcagggggagttcttccgaggacagacaagatttctggagtttggaaagggtgagagactgggtcagcgaaaggaacattccggtctttatgttgggatgcaacgtatagatacagggatgagacccaaaagagccggcagaggtttgtcatcgtgctcgcaaggcaactgcgtatggctgatcccgtaaaggatacacatacctagagcggcacgtaaagatgcatccagcatgacgggtggagcacgatgcttggactcgagctctgctcctgtgcgttccgtgatcaatggcttatactacctgcacctcagtttttcccgggcaaaaaaggaagcttgctgccggtgcgttggcacctgccttaaagtgccagctactcagcgggctgaagaggaagaagttcctactaggaagacacgtggacacgtatgtttactgcagcactatttacaatagcaaagacttggaaccaactcgaatgcccatgaatgataggctggataaagaaagtgtggcacgtatacagcatggaattactacgcagccataaaaaaggatgagttcatgacctctgcgggaacgtggatgaagctggaaggcctcattctcagcaaactgacacaggaagcgaaaaccaaacaccgcatgttctcgctcctaagtgggagttgaacagcgagaacacatgggacacagggaggggaacatcacacgccgggccctgacggggcgtggggggcaaggggagagagagcattaggacaaatagccaacgcatgcggggcttcaaacctagacgactggtggataggtgcagcaaagcaccgtggcacacgtgtacctatgttccaaacctgcacgtcctgcacatgtaccccagaacttgggagggggtgggggaaaccaaaagagcgagggagaggcggggggggggaaagagagggagagagggaaagagagagagagacaggagagaggagagagagagagagagagagagagagagacagagagagagacagagagacagagacagacacagagagacggagagacagagagagagagagagagagagagagagacaggagaaagaagaactccgggtgggtcccattcctttaaaaggtcgccacccactcgactgccaagctgagatcctaaggacctccccaaaggaggaggtcgtggccttcccaaagcgcagtagccacggtggaaacgaaagcgtgccgcataagcctaccgtctaccgcccgcacatcaggaacctcaaggtacttcagggaagcagttaagtcaagccggcgcgtcacaggcactcggcgtgcaagccgccccgcaggtgctaccgtctcttacctccctctacttttaggaaacacgttgtatccccggagggggtgcaccgttcctggaggtactgcaataccaggtcgatgcgtggagtggacggagcaagctcctattccatctccctgctccaaaaatccatttaatatattgtcctcggatagaggacgtatcagatattaaactgataagaacagatactacacttgatcttagccaaaaggccgagaagcgatgcgctcgccttcgcgcccgccgtcaccgtcccactctcatccacattcaagtcgcggtgagagccccagcctcgctcctttgccccattccctctgtctcgtccacagcgctattgacgcccttacactctcgggctgatttccttattcttccgccttttgaaaagggaaatcttacacccgcgcttcttccggcgttcccgggctttcatttccaatttgcatgccccgccctttcacagagggcgctctgcgggacgtggatgatgctggaaggcctcattctcagcaaactgaaaggaagcgaaaaccaaacaccgcatgttctcgctcctaagtgggagttgaacagcgagaacacatgggacacagggaggggaacatcacacgccgggccctgacggggcgtggggggcaaggggagagagagcattaggacaaatagccaacgcatgcggggcttcaaacctagacgactggtggataggtgcagcaaagcaccgtggcacacgtgtacctatgttccaaacctgcacgtcctgcacatgtaccccagaacttgggagggggtgggggaaaccaaaagagcgagggagaggcggggggggggaagagagagagagagggaaagagagagagagacagagagaggagagagagagagagagacagagagagagacagagagacagagacagacacagagagacggagagacagagagagagagagagagaaagagagagagagagagacaggagaaagaagaactccgggtgggtcccattcctttaaaaggtcgccacccactcgactgccaagctgagatcctaaggacctccccaaaggaggaggtcgtggccttcccaaagcgcagtagccacggtggaaacgaaagcgtgccgcataagcctaccgtctaccgcccgcacatcaggaacctcaaggtacttcagggaagcagttaagtcaagccggcgcgtcacaggcactcggcgtgcaagccgccccgcaggtgctaccgtctcttacctccctctacttttaggaaacacgttgtatccccggagggggtgcaccgttcctggaggtactgcaataccaggtcgatgcgtggagtggacggagcaagctcctattccatctccctgctccaaaaatccatttaatatattgtcctcggatagaggacgtatcagatattaaactgataagaacagatactacacttgatcttagccaaaaggccgagaagcgatgcgctcgccttcgcgcccgccgtcaccgtcccactctcatccacattcaagtcgcggtgagagccccagcctcgctccttgccccattccctctgtctcgtccacagcgctattgacgcccttacactctcgggctgatttcttattctccgcctttgaaaagggaaatcttacacccgtgcttcttccggcgttcccgggctttcatttccaatttgcatgcccccgcccctttcacagagggcgtggcctccgccgttgactccgccccccggggccgccttctgcctgggggagccggggctccgctgggggcgacttccttgttcgtatcgagcccagcgaaaagacagaaccggaagagaccgggggcgaaggcgacaggggtctgtggaagagacctgtcggcggagagcggtccacgttttcctggagaaagacgaggccccagggcaggagcgcgggctgcgctgggcctttacttcgccgcccgcgggcggggagaccggccccgtacccgaggggacgaggggacgaggggcccatgcccagtcagggaagccgaaggcctggaggggcttccgggagcaggggctggagttcctctgccaggcaggaggctggcaccagacacccggcagagggaggcggcgagggcccagcaaggattctccccagcccctgtgcctgcgtctcctgcggcttctgtgcgcggaccgtgtcctgtgctgtgtagggaacgctgcctctctgctcgggacgtggattcctttcccctcctcctcgcccggctacttctgacgcaggtcgtcaggactccgcttgggtgtcacccgtgcaggaagcctcccttagtcaagggccctcggcacccgccccatatgtgactagcagccctcctgtgtatttcatcgcgcccccgttgtttatatcagccattccactcaccacccttctgggcaaccctttatctcccgctctgaaatcccatcgctgagggctgggacccctcctcagtgcttatccctgtttccccgcgcgagtctggcgcctggcgtgtggaaggcgctcagtaaacgtttgtggagcgaagaaacgacgcaaaggtgatgagcacgacgcagttaggaggctattggcccggcgcgggggaaaagggggaaggtcgggctcggggtggcaggaccccagagggcaggggtggctgccggggtgctcttggggcaaggtgggcgtcaaggcccccagcaaggttgggataaagttcctctccgaggcacagactgccgcctgcgggctcagcatttacctctcccttcctccttcctaacgcaacttcagcggagggctgagggctctactgcgcattacctggaaaacttatttcactccacggccctaagaggtgggccttattattagccacggccagggttagggtgaggccactcctccagggcagaatttcagggggtgcccacccccccgccctaaatcattcagcaatcaacataaattatagttcaacgcaatgtatcttatcttgtgggccgcaagccacccaggtgcccaggcaagagcctgaaggcacaagctgttccagtacagcgaagaaaataattagaataagaaaagttttactagagataggaaacggataggattatatctgactattattaatcattagtttgtagcatcactctttgttctattaccataatgatctctgttctattatgattaccttgggggaaaccaggccacacagagttaggagctgaagggccacagtgagaggtgaccagaagacgagagtgtgagccctcattcacgcccagagaagggccgctggagggctccttggcctagcggtaatgccagtgcctgggaaggccctggttacttagcaggccttggtctagcggtggccccagtgcctgggaaggcacccgttacttagcagacccggaaagggaatctccctctctccaggggagacagagaacgctccgctccaccacctcttgtgggaggtctgacattagccaggccggcccgcagtcatccggaggctccaacgtctgtctccctgtgatgctgtgcttcagtggtcacgctccttgttcactttcatgttcagcctgtacacctggctcctccttttaagttcttagaagacagcagtagcagaactagtaggagtaccacagtcttcgatctttctgataagtgcatagaagaaacgctgacgtttgctgtcctccctctccacctcggctaccacaaagggaaaggccccctgtccagtgcacacgtgactcgcgtgacctatcgatcattggagatgactggcactccttaccctgcccccttgccttgactacaataaatagcagcgctccaggcactcggggcactacctgtctgtctccgcgctttggtggcagtggtcccccgggcccagctgtctttcttcctatctctttgtcttctgtctttatctcttcgatctctcgtctccgcacacacgcgaagagaaaacccacagacccggtaggggtggaccctacattatctcagctacaacataatcaggatattcacgtggactactgagtctttcggtgcccccttgctgttttagttttgtcctgcggccgagtgtttccctcgcttcacgccaacacaatctccgccgccctgtcttgtcatccccattctacagcccagcacggtgtagtatggcagccgctagccacaggtatctagggagccctggaaatgtggtcagttctaatggagctgtgctgtaagtgtgaaatacacgtgggattttgacggcagtgggagcaaaattctcccaatttttttttttttttttttttttcagacggaggttccgctcttgttacccagcctggagtccagtggcgcgatctaggctctctgcaacctccgcctcccgggttcaagcgattccccttagatacagggatgagacccaaaagagccggcagaggtttttcatcgtgctcgcaagggcaactgcccggtggctgatcccgtaaaggatacacatacctagagcggagcctaaagatgcatccagcatgacgggtggagccacgatgcttggactcgagctctgctcctgtgcgttccgtgatcaatggcttatactacctgcacctcagtttttcccgggcaaaaaaggaagcttgctgccggtgcgttggcacctgccttaaagtgccagctactcagcgggctgaagaggaagaagttcctactaggaagacacgtggacacgtatgtttactgcagcactatttacaatagcaaagacttggaaccaactcgaatgcccatgaatgataggctggataaagaaagtgtggcacgtatacagcatggaattactacgcagccataaaaaaggatgagttcatgacctctgcgggaacgtggatgaagctggaaggcctcattctcagcaaactgacacaggaagcgaaaaccaaacaccgcatgttctcgctcctaagtgggagttgaacagcgagaacacatgggacacagggaggggaacatcacacgccgggccctgacggggcgtggggggcaaggggagagagagcattaggacaaatagccaacgcatgcggggcttcaaacctagacgactggtggataggtgcagcaaagcaccgtggcacacgtgtacctatgttccaaacctgcacgtcctgcacatgtaccccagaacttgggagggggtgggggaaaccaaaagagcgagggagaggcgggggggggggaagagagagagagagggaaagagagagagagacagagagaggagagagagagagagagagagagagagacagagagagagacagagagacagagacagacacagagagacggagagacagagagagagagagagaaagagagagagagagagagagagagagagagagacaggagaaagaagaactccgggtgggtcccattcctttaaaaggtcgccacccactcgactgccaagctgagatcctaaggacctccccaaaggaggaggtcgtggccttcccaaagcgcagtagccacggtggaaacgacagcgtgccgcataagcctaccgtctaccgcccgcacatcaggaacctcaaggtacttcagggaagcagttaagtcaagccggcgcgtcacaggcactcggcgtgcaagccgccccgcaggtgctaccgtctcttacctccctctacttttaggaaacacgttgtatccccggagggggtgcaccgttcctggaggtactgcaataccaggtcgatgcgtggagtggacggagcaagctcctattccatctccctgctccaaaaatccatttaatatattgtcctcggatagaggacgtatcagatattaaactgataagaacagatactacacttgatcttagccaaaaggccgagaagcgatgcgctcgccttcgcgcccgccgtcaccgtcccactctcatccacattcaagtcgcggtgagagccccagcctcgctccttgccccattccctctgtctcgtccacagcgctattgacgcccttacactctcgggctgatttcttattctccgcctttgaaaagggaaatcttacacccgtgcttcttccggcgttcccgggctttcatttcgaatttgcatgccccgccctttcacagagggcgtggcctccgccgttgactccgcccccggggccgcctctgcctgggggagccggggctccgctgggggcgacttccttgttcgtatcgagccagcgaaaagacagaaccggaagagaccgggggcgaaggcgacaggggtctgtggaagagacctgtcggcggagagcggtccacgttttcctggagaaagacgaggccccagggcaggagcgcgggctgcgctgggcctttacttcgccgcccgcgggcggggagaccggccccgtacccgaggggacgaggggacgaggggcccatgcccagtcagggaagccgaaggcctggaggggcttccgggagcaggggctggagttcctctgccaggcaggaggctggcaccagacacccggcagagggaggcggcgagggcccagcaaggattctccccagcccctgtgcctgcgtctcctgcggcttctgtgcgcggaccgtgtcctgtgctgtgtagggaacgctgcctctctgctcgggacgtggattcctttcccctcctcctcgcctggctacttctgacgcaggtcgtcaggactccgcttgggtgtcacccgtgcaggaagcctcccttagtcaagggccctcggcacccgccccatatgtgactagcagccctcctgtgtatttcatcgcgcccccgttgtttatatcagccattccactcaccacccttctgggcaaccctttatctcccgctctgaaatcccatcgctgagggctgggacccctcctcagtgcttatccctgtttccccgcgcgagtctggcgcctggcgtgtggaaggcgctcagtaaacgtttgtggagcgaagaaacgacgcaaaggtgatgagcacgacgcagttaggaggctattggcccggcgcgggggaaaaaggggaaggtcgggctcggggtggcaggaccccagagggcaggggtggctgccggggtgctcttggggcaaggtgggcgtcaaggcccccagcaaggttgggataaagtttctctccgaggcacagactgccgcctgcgggctcagcatttacctctcccttcctccttcctaacgcaacttcagcggagggctgagggctctactgcgcattacctggaaaacttatttcactccacggccctaagaggtgggccttattattagccacggccagggttagggtgaggccactcctccagggcagaatttcagggggtgcccaaccccccgccctaaatcattcagcaatcaacataaattatagttcaacgcaatgtatcttatcttgtgggccgcaagccacccaggtgcccaggcaagagcctgaaggcacaagctgttccagtacagcgaagaaaataattagaataagaaaagttttactagagataggaaacggataggattatatctgactattattaatcattagtttgtagcatcactctttgttctattaccataatgatctctgttctattatgattaccttggggaaaccaggccacacagagttaggagctgaagggccacagtgagaggtgaccagaagacgagagtgtgagccctcattcacgcccagagaagggccgctggaggctccttggctagcggtaatgccagtgcctgggaaggccctggttacttagcaggccttggtctagcggtggcccagtgcctgggaaggcacccgttacttagcagacccggaaagggaatctccctctctccaggggagacagagtcagacgctccaccacctcttgtgggaggtctgacattagccaggccggcccgcagtcatccggaggctccaacgtctgtctccctgtgatgctgtgcttcagtggtcacgctccttgttcactttcatgttcagcctgtacacctggctcctccttttaagttcttagaagacagcagtagcagaactagtaggagtaccacagtcttcgatctttctgataagtgcatagaagaaacgctgacgtttgctgtcctccctctccacctcggctaccacaaagggaaaggccccctgtccagtgcacacgtgactcgcgtgacctatcgatcattggagatgactggcactccttaccctgcccccttgccttgactacaataaatagcagcgcctccaggcactcggggccactacctgtctgtctccgcgctttggtggcagtggtcccccgggcccagctgtctttcttcctatctctttgtcttctgtctttatctcttcgatctctcgtctccgcacacacgcgaagagaaaacccacagacccggtaggggtggaccctacattatctcagctacaacataatcaggatattcacgtggactactgagtctttcggtgcccccttgctgttttagttttgtcctgcggccgagtgtttccctcgcttcacgccaacacaatctccgccgccctgtcttgtcatccccattctacagcccagcacggtgtagtatggcagccgctagccacaggtatctagggagccctggaaatgtggtcagttctaatggagctgcgctgttaagtgtgaaatacacgtgggattttgacggcagtgggagcaaaattctcccaatttttttttttttttttttttttttcagacggaggttccgctcttgttacccagcctggagtccaatggcgcgatctaggctctctgcaacctccgcctcccgggttcaagcgattcccctgcctcagcctcccgagcagctgggactacaggcatgtgccaccacgcccggctaactttgtatttttagtacagatggggtttctccacgttgctcaggctggtctccaactcccgacctccggtgatctgcccagctgccgcctcccaaagtgttgcttgcgattacaggcttgagccaccgctcaccctggcttttttttttttttttccagacaaactctcgctctgtcgcccaggctggagtgcagtggcgcgatctcggctcactgcagcctctacctcccgggttccagcgattctcctgcctcagcctcctgggtagctgggattacaggcgcaggccaccacgcccggctaatttttgtatttttagggggtttcgccatgtcggccaggctggtctcgagctcctgacctcaggcgatccgcccgcctcggcctcccaaagcgctgggattacaggcgtaagccaccgcgccgggctctttcattctgtctttattttctgagatagagtcctgctcggacgctcaggttggactgcaacggcgtgatctcggctcgctgaaacttccgcctcccgggttcaagcgattctcctgtctcagcctcccgagtagctgggattattgacggcagcaccacgcccggctactttttgtggtttttgtatcttctgtcttctgctctttagtaccgcatagagccgcagaagactagcgagtcgaacaaacggcccctcttgcagcagttgttgatcacgggctgccccccggtactcatcctgtgtctctcgtccaaatccccgctcctcctcagctatcacctctgccgatgctggtggtttccctgggtaccgggaaccaaactctcattccccagcgctaagccccccgtgccaggcccttctcaagtcagggttcctgcacattcacagttacggtggccctgggagtaacacctggcacccaaacaggtcaccagagtccacacatagtccacctgccctccctgcgtaagatcagctcttcctcctcccgacgatagatcagggtcaatgatccctgccaagatggcgactgctccagcctgctggtccaacctgtccagccacagctgttgctcgaaggcttgaagttcaatgggaccctctcccgctttctacaaactggttcctttatttttatgtttatttatttgggacggggtctggctctgtcacccaaggctggagtgcagtggtgcaatcactgctcactgcagcatccacctcccagcgtccacccatcctcctggcctcagcctccggaacagctggggtacaggtacgccccagcccgaacaggttttcactaggttgcctgggctctttctttctttgtctgtgtttgtttgttggttggttggttggttggttggtttttgtttgtttgtttcgagacggggctccggctctgccgccgggggctgcagtgcaatggcgcgatctcacctcactgcggccttctgggctcaagcgatcctcccactgtgcccggcctgaagacagcctttagagaaagaagcagggggagttcttccgaggacagacaagatttctggagtttggaaagggtgagagactgggtcagcgaaaggaacattccggtctttatgttgggatgcaacgtatagatacagggatgagacccaaaagagccggcagaggtttgtcatcgtgctcgcaaggcaactgccggtggctgatcccgtaaaggatacacatacctagagcggagcctaaagatgcatccagcatgacgggtggagccacgatgcttggactcgactctgctcctgtgcgttccgtgatcaatggcttatactacctgcacctcagtttttcccgggcaaaaaaggaagcttgctgccggtgcgttggcacctgccttaaagtgccagctactcagcgggctgaagaggaagaagttcctactaggaagacacgtggacacgtatgtttactgcagcactatttacaatagcaaagacttggaaccaactcgaatgcccatgaatgataggctggataaagaaagtgtggcacgtatacagcatggaattactacgcagccataaaaaaggatgagttcatgacctctgcgggaacgtggatgaagctggaaggcctcattctcagcaaactgacacaggaagcgaaaaccaaacaccgcatgttctcgctcctaagtgggagttgaacagcgagaacacatgggacacagggaggggaacatcacacgccgggccctgacggggcgtggggggcaaggggagagagagcattaggacaaatagccaacgcatgcggggcttcaaacctagacgactggtggataggtgcagcaaagcaccgtggcacacgtgtacctatgttccaaacctgcacgtcctgcacatgtaccccagaacttgggagggggtgggggaaaccaaaagagcgagggagaggcgggggggggaaagagagagagagagggaaagagagagagagacagagagaggagagagagagtgagagagagagagagagagagagagacagagagagagacagagagacagagacagacacagagagacggagagacagagagagagagagagaaagagagagagagagagagagacaggagaaagaagaactccgggtgggtcccattcctttaaaaggtcgccacccactcgactgccaagctgagatcctaaggacctccccaaaggaggaggtcgtggccttcccaaagcgcagtagccacggtggaaacgaaagcgtgccacataagcctaccgtctaccgcccgcacatcaggaacctcacggtacttcagggaagcagttaagtcaagccggcgcgtcacaggcactcggcgtgcaagccgccccgcaggtgctaccgtctcttacctccctctacttttaggaaacacgttgtatccccggagggggtgcaccgttcctggaggtactgcaataccaggtcgatgcgtggagtggacggagcaagctcctattccatctccctgctccaaaaatccatttaatatattgtcctcggatagaggacgtatcagatattaaactgataagaacagatactacacttgatcttagccaaaaggccgagaagcgatgcgctcgccttcgcgcccgccgtcaccgtcccactctcatccacattcaagtcgcggtgagagccccagcctcgctccttgccccattccctctgtctcgtccacagcgctattgacgcccttacactctcgggctgatttcttattctccgcctttgaaaagggaaatcttacacccgtgcttcttccggcgttcccgggctttcatttcgaatttgcatgccccgccctttcacagagggcgtggcctccgccgttgactccgcccccggggccgcctctgcctgggggagccggggctccgctgggggcgacttccttgttcgtatcgagccagcgaaaagacagaaccggaagagaccgggggcgaaggcgacaggggtctgtggaagagacctgtcggcggagagcggtccacgttttcctggagaaagacgaggccccaggcaggagcgcgggctgcgtgggccttttacttcgccgcccgggtaagtaaccgggccccgtacccgaggggacgggggaacccccagcaagctggataaagttctttccgagcacagactggcgcctgcgggctcagcatttacctctcccgtccttccctaacgcaacttcagcggagggctgaggggctctactgcgcattacctggaaaacttatttcactccacggccctaagaggtgggccttattattagccacggccagggttagggtgaggccactcctccagggcagaatttcagggggtgcccacccccccgccctaaatcattcagcaatcaacataaattatagttcaacgcaatgtatcttatcttgtgggccgcaagccacccaggtgcccaggcaagagcctgaaggcacaagctgttccagtacagcgaagaaaataattagaataagaaaagttttactagagataggaaacggataggattatatctgactattattaatcattagtttgtagcatcactctttgttctattaccataatgatctctgttctattatgattaccttgggggaaaccaggccacacagagttaggagctgaagggccacagtgagaggtgaccagaagacgagagtgtgagccctcattcacgcccagagaagggccgctggagggctccttggcctagcggtaatgccagtgcctgggaaggccctggttacttagcaggccttggtctagcggtggccccagtgcctgggaaggcacccgttacttagcagacccggaaagggaatctccctctctccaggggagacagagaacgctccgctccaccacctcttgtgggaggtctgacattagccaggccggcccgcagtcatccggaggctccaacgtctgtctccctgtgatgctgtgcttcagtggtcacgctccttgttcactttcatgttcagcctgtacacctggctcctccttttaagttcttagaagacagcagtagcagaactagtaggagtaccacagtcttcgatctttctgataagtgcatagaagaaacgctgacgtttgctgtcctccctctccacctcggctaccacaaagggaaaggccccctgtccagtgcacacgtgactcgcgtgacctatcgatcattggagatgactggcactccttaccctgcccccttgccttgactacaataaatagcagcgcctccaggcactcggggccactacctgtctgtctccgcgctttggtggcagtggtcccccgggcccagctgtctttcttcctatctctttgtcttctgtctttatctcttcgatctctcgtctccgcacacacgcgaagagaaaacccacagacccggtaggggtggaccctacattatctcagctacaacataatcaggatattcacgtggactactgagtctttcggtgcccccttgctgttttagttttgtcctgcggccgagtgtttccctcgcttcacgccaacacaatctccgccgccctgtcttgtcatccccattctacagcccagcacggtgtagtatggcagccgctagccacaggtatctagggagccctggaaatgtggtcagttctaatggagctgtgctgtaagtgtgaaatacacgtgggattttgacggcagtgggagcaaaattctcccaattttttttttttttttttttttttttcagacggaggttccgctcttgttacccagcctggagtccaatggcgcgatctaggctctctgcaacctccgcctcccgggttcaagcgattcccctgcctcagcctcccgagcagctgggactacaggcatgtgccaccacgcccggctaactttgtatttttagtacagatggggtttctccacgttgctcaggctggtctccaactcccgacctccggtgatctgcccagctgccgcctcccaaagtgttgcttgcgattacaggcttgagccaccgctcaccctggcttttttttttttttttccagacaaactctcgctctgtcgcccaggctggagtgcagtggcgcgatctcggctcactgcagcctctacctcccgggttccagcgattctcctgcctcagcctcctgggtagctgggattacaggcgcaggccaccacgcccggctaatttttgtatttttagggggtttcgccatgtcggccaggctggtctcgagctcctgacctcaggcgatccgcccgcctcggcctcccaaagcgctgggattacaggcgtaagccaccgcgccgggctctttcattctgtctttattttctgagatagagtctcgctcggacgctcaggttggactgcaacggcgtgatctcggctcgctgaaacttccgcctcccgggttcaagcgattctcctgtctcagcctcccgagtagctgggattattgacgggcagcaccacgcccggctactttttgtggtttttgtatcttctgtcttctgctctttagtaccgcatagagccgcagaagactagcgagtcgaacaaacggcccctcttgcagcagttgttgatcacggggctgccccccggtactcatcctgtgtctctcgtccaaatccccgctcctcctcagctatcacctctgccgatgctggtggtttccctgggtaccgggaaccaaactctcattccccaggggccctaagcccccccgtggccaggcccttctcaagtcagggttcctgcacattcacagttacgggtggccctgggagtaacacctggcacccaaacaggtcaccagagtccacacatagtccacctgccctccctgcgtaagatcagctcttcctcctcccgacgatagatcagggtcaatgatccctgccaagatggcgactgctccagcctgctggtccaacctgtccagccacagctgttgctcgaaggcttgaagttcaatgggaccctctcccgctttctacaaactggttcctttatttttatgtttatttatttgggacggggtctggctctgtcacccaggctggagtgcagtggtgcaatcactgctcacagcagcatccacctcccagcgtccacccatcctcctggcctcagctccggaacagctggggtacaggtacgagtagcatactagtaggagtaccacagtcttcgatctttctgataagttgtttcagcttgcgctgacgtttgctgtcctccctctccacctcggctaccacaaagggaaaggccccctgtccagtgcacacgtgactcgcgtgacctatcgatcattggagatgactggcactccttaccctgcccccttgccttgactacaataaatagcagcgcctccaggcactcggggccactacctgtctgtctccgcgctttggtggcagtggtcccccgggcccagctgtctttcttcctatctctttgtcttctgtctttatctcttcgatctctcgtctccgcacacacgcgaagagaaaacccacagacccggtaggggtggaccctacattatctcagctacaacataatcaggatattcacgtggactactgagtctttcggtgcccccttgctgttttagttttgtcctgcggccgagtgtttccctcgcttcacgccaacacaatctccgccgccctgtcttgtcatccccattctacagcccagcacggtgtagtatggcagccgctagccacaggtatctagggagccctggaaatgtggtcagttctaatggagctgtgctgtaagtgtgaaatacacgtgggattttgacggcagtgggagcaaaattctcccaatttttttttttttttttttttttcagacggaggttccgctcttgttacccagcctggagtccagtggcgcgatctaggctctctgcaacctccgcctcccgggttcaagcgattcccctgcctcagcctcccgagcagctgggactacaggcatgtgccaccacgcccggctaactttgtatttttagtacagatggggtttctccacgttgctcaggctggtctccaactcccgacctccggtgatctgcccagctgccgcctcccaaagtgttgcttgcgattacaggcttgagccaccgctcaccctggctttttttttttttttttccagacaaactctcgctctgtcgcccaggctggagtgcagtggcgcgatctcggctcactgcagcctctacctcccgggttccagcgattctcctgcctcagcctcctgggtagctgggattacaggcgcaggccaccacgcccggctaatttttgtatttttagggggtttcgccatgtcggccaggctggtctcgagctcctgacctcaggcgatccgcccgcctcggcctcccaaagcgctgggattacaggcgtaagccaccgcgccgggctctttcattctgtctttattttctgagatagagtctcgctcggacgctcaggttggactgcaacggcgtgatctcggctcgctgaaacttccgcctcccgggttcaagcgattctcctgtctcagcctcccgagtagctgggattattgacgggcagcaccacgcccggctactttttgtggtttttgtatcttctgtcttctgctctttactaccgcatagagccgcataagaccccccagcaaggtgggataaagttttctccgaggcacagatctggccctgcgggctcagcatttacctctcccttcctccttccaacgcaacttcagcggagggctgagggctctactgcgcattacctggaaaacttatttcactccacgccctaagaggtggccttattattaccacggccagggttagggtgaggccactcctccagggcagaatttcaggggtgccacccccccgccctaaatcattcagcaatcaacataaattatagttcaacgcaatgtatcttatcttgtggccgcaagccacccaggtgcccagcaagacctgaaggcacaagctgttccagtacagcgaagaaaataattagaataagaaaagttttactagagataggaaaacggataggattatatctgactattattaatcattagtttgtagcatcactctttgttctattaccataatgatctctgttctattatgattaccttgggggaaaccaggccacacagagttaggagctgaagggccacagtgagaggtgaccagaagacgagagtgtgagccctcattcacgcccagagaagggccgctggagggctccttggcctagcggtaatgccagtgcctgggaaggccctggttacttagcaggccttggtctagcgtggccccagtgcctgggaaggcacccgttacttagcagacccggaaagggaatctccctctctccaggggagacagagaacgctccgctccaccacctcttgtgggaggtctgacattagccaggccggcccgcagtcatccggaggctccaacgtctgtctccctgtgatgctgtgcttcagtggtcacgctccttgttcactttcatgttcagcctgtacacctggctcctccttttaagttcttagaagacagcagtagcagaactagtaggagtaccacagtcttcgatctttctgataagtgcatagaagaaacgctgacgtttgctgtcctccctctccacctcggctaccacaaagggaaaggccccctgtccagtggacacgtgactcgcgtgacctatcgatcattggagatgactggcactccttaccctgcccccttgccttgactacaataaatagcagcgcctccaggcactcggggccactacctgtctgtctccgcgctttggtggcagtggtcccccgggcccagctgtctttcttcctatctctttgtcttctgtctttatctcttcgatctctcgtctccgcacacacgcgaagagaaaacccacagacccggtaggggtggaccctacattatctcagctacaacataatcaggatattcacgtggactactgagtctttcggtgcccccttgctgttttagttttgtcctgcggccgagtgtttccctcgcttcacgccaacacaatctccgccgccctgtcttgtcatccccattctacagcccagcacggtgtagtatggcagccgctagccacaggtatctagggagccctggaaatgtggtcagttctaatggagctgtgctgtaagtgtgaaatacacgtgggattttgacggcagtgggagcaaaattctcccaatttttttttttttttttttttttcagacggaggttccgctcttgttacccagcctggagtccaatggcgcgatctaggctctctgcaacctccgcctcccgggttcaagcgattcccctgcctcagcctcccgagcagctgggactacaggcatgtgccaccacgcccggctaactttgtatttttagtacagatggggtttctccacgttgctcaggctggtctccaactcccgacctccggtgatctgcccagctgccgcctcccaaagtgttgcttgcgattacaggcttgagccaccgctcaccctggcttttttttttttttttccagacggaggttccgctcttgttacccagcctggagtccagtggcgcgatctaggctctctgcaacctccgcctcccgggttcaagcgattcccctgcctcagcctcccgagcagctgggactacaggcatgtgccaccacgcccggctaactttgtatttttagtacagatggggtttctccacgttgctcaggctggtctccaactcccgacctccggtgatctgcccagctgccgcctcccaaagtgttgcttgcgattacaggcttgagccaccgctcaccctggctttttttttttttttttccagacaaactctcgctctgtcgcccaggctggagtgcagtggcgcgatctcggctcactgcagcctctacctcccgggttccagcgattctcctgcctcagcctcctgggtagctgggattacaggcgcaggccaccacgcccggctaatttttgtatttttagggggtttcgccatgtcggccaggctggtctcgagctcctgacctcaggcgatccgcccgcctcggcctcccaaagcgctgggattacaggcgtaagccaccgcgccgggctctttcattctgtctttattttctgagatagagtctcgctcggacgctcaggttggactgcaacggcgtgatctcggctcgctgaaacttccgcctcccgggttcaagcgattctcctgtctcagcctcccgagtagctgggattattgacgggcagcacgatcattggagatgactggcataccttacctgcccccttgccttgactacaataaatagcagccctccaggcactcggggcactacctgtctgtctccgcgctttggtggcagtggtcccccgggcccagctgtctttcttcctatctctttgtcttctgtctttatctcttcgatctctcgtctccgcacacacgcgaagagaaaacccacagacccggtagggtggaccctacattatctcagctacaacataatcaggatattcacgtggactactgagtctttcggtgcccccttgctgttttagttttgtcctgcggccgagtgtttccctcgcttcacgccaacacaatctccgccgccctgtcttgtcatccccattctacagcccagcacggtgtagtatggcagccgctagccacaggtatctagggagccctggaaatgtggtcagttctaatggagctgtgctgtaagtgtgaaatacacgtgggattttgacggcagtgggagcaaaattctcccaattttttttttttttttttttttttcagacggaggttccgctcttgttacccagcctggagtccaatggcgcgatctaggctctctgcaacctccgcctcccgggttcaagcgattcccctgcctcagcctcccgagcagctgggactacaggcatgtgccaccacgcccggctaactttgtatttttagtacagatggggtttctccacgttgctcaggctggtctccaactcccgacctccggtgatctgcccagctgccgcctcccaaagtgttgctttcgattacaggcttgagccaccgctcaccctggctttttttttttttttttccagacaaactctcgctctgtcgcccaggctggagtgcagtggcgcgatctcggctcactgcagcctctacctcccgggttccagcgattctcctgcctcagcctcctgggtagctgggattacaggcgcaggccaccacgcccggctaatttttgtatttttagggggtttcgccatgtcggccaggctggtctcgagctcctgacctcaggcgatccgcccgcctcggcctcccaaagcgctgggattacaggcgtaagccaccgcgccgggctctttcattctgtctttattttctgagatagagtctcgctcggacgctcaggttggactgcaacggcgtgatctcggctcgctgaaacttccgcctcccgggttcaagcgattctcctgtctcagcctcccgagtagctgggattattgacgggcagcaccacgcccggctactttttgtggtttttgtatcttctgtcttctgctctttagtaccgcatagagccgcagaagactagcgagtcgaacaaacggcccctcttgcagcagttgttgatcacggggctgccccccggtactcatcctgtgtctctcgtccaaatccccgctcctcctcagctatcacctctgccgatgctggtggtttccctgggtaccgggaaccaaaactctcattccccaggggcctaaagcccccccgtggccaggccccctgtggaaggcgctcagtaaacgtttgtggagcgaagaaacgacgcaaaggtgatgagcacgacgcagttaggaggctattggcccggcgcgggggaaaaaggggaaggtcgggctcggggtggcaggaccccagaggcatggggtggctgcaggggtgctcttggggcaaggtgggcgtcaaggccccagcaaggttgggataaagtttctctccgaggcacagactgccgcctgggctcagcatttacctctcccttcctccttcctaacgcaacttcagcggagggctgagggctctactgcgcattacctggaaaacttatttcactccacggccctaagaggtgggccttattattagccatgccagggttagggtgaggcactcctccagggcagaatttcagggggtgccaacccgcgccctaaatcattcagcaatcaacataaattatagttcaacgcaatgtatcttatcttgtgggccgcaagccacccaggtgcccaggcaagagctgaaggacaagctgttccagtacagcgaagaaaataattagaataagaaaagttttactagagataggaaacggataggattatatctgactattattaatcattagtttgtagcatcactctttgttctattaccataatgatctctgttctattatgattaccttgggggaaaccaggccacacagagttaggagctgaagggccacagtgagaggtgaccagaagacgagagtgtgagccctcattcacgcccagagaagggccgctggagggctccttggcctagcggtaatgccagtgcctgggaagcgcctggttacttagcaggccttggtctagcggtggccccagtgctgggaagcaccgttacttagcagacccggaaagggaatctccctctctccaggggagacagagaacgctccgctccaccacctcttgtgggaggtctgacattagccaggccggcccgcagtcatccggaggctccaacgtctgtctccctgtgatgctgtgcttcagtggtcacgctccttgttcactttcatgttcagcctgtacacctggctcctccttttaagttcttagaagacagcagtagcagaactagtaggagtacacagtcttcgatctttctgataagtgcatagaagaaacgctgacgtttgctgtcctccctctccacctcggctaccacaaagggaaaggccccctgtccagtggacacgtgactcgcgtgacctatcgatcattggagatgactggcactccttaccctgcccccttgccttgactacaataaatagcagcgcctccaggcactcggggccactacctgtctgtctccgcgctttggtggcagtggtcccccgggcccagctgtctttcttcctatctctttgtcttctgtctttatctcttcgatctctcgtctccgcacacacgcgaagagaaaacccacagacccggtaggggtggaccctacattatctcagctacaacataatcaggatattcacgtggactactgagtctttcggtgcccccttgctgttttagttttgtcctgcggccgagtgtttccctcgcttcacgccaacacaatctccgccgccctgtcttgtcatccccattctacagcccagcacggtgtagtatggcagccgctagccacaggtatctagggagccctggaaatgtggtcagttctaatggagctgtgctgtaagtgtgaaatacacgtgggattttgacggcagtgggagcaaaattctcccaatttttttttttttttttttttttcagacggaggttccgctcttgttacccagcctggagtccaatggcgcgatctaggctctctgcaacctccgcctcccgggttcaagcgattcccctgcctcagcctcccgagcagctgggactacaggcatgtgccaccacgcccggctaactttgtatttttagtacagatggggtttctccacgttgctcaggctggtctccaactcccgacctccggtgatctgcccagctgccgcctcccaaagtgttgcttgcgattacaggcttgagccaccgctcaccctggcttttttttttttttttccagacaaactctcgctctgtcgcccaggctggagtgcagtggcgcgatctcggctcactgcagcctctacctcccgggttccagcgattctcctgcctcagcctcctgggtagctgggattacaggcgcaggccaccacgcccggctaatttttgtatttttagtacctccctcccctccccccccgttgctcaggctggtctccaactcccttcttgggagagatctgcccagctgccgcctcccaaagtgttgcttgcgattacaggcttgagcaccgctcaccctggctttttttttttttttttccagacaaactctcgctctgtcgcccaggctggagtgcagtggcgcattctcggctcactgcagcctctacctcccgggttccagcgattctcctgcctcagcctcctgggtagctgggattacaggcgcagcgcaccacgcccggctaatttttgtatttttagggggtttcgccatgtcggccaggctggtctcgagctcctgacctcaggcgatccgccgcctcggcctcccaaagcgctgggattacaggcgtacagccgcgccgggctctttcattctgtctttattttctgagatagagtctcgctcggacgctcaggttggactgcaacggcgtgatctcggctcgctgaaacttccgcctcccgggttcaagcgattctcctgtctcagcctcccgagtagctgggattattgacgggcagcaccacgcccggctactttttgtggtttttgtatcttctgtcttctgctctttagtaccgcatagagccgcagaagactagcgagtcgaacaaacggcccctcttgcagcagttgttgatcacggggctgccccccggtactcatcctgtgtctctcgtccaaatccccgctcctcctcagctatcacctctgccgatgctggtggtttccctgggtaccgggaaccaaactctcattccccaggggcctaagccccccgtggccaggcccttctcaagtcagggttcctgcacattcacagttacgggtggccctgggagtaacacctggcacccaaacaggtcaccagagtccacacatagtccacctgccctccctgcgtaagatcagctcttcctcctcccgacgatagatcagggtcaatgatccctgccaagatggcgactgctccagcctgctggtccaaacctgtccagccacagctgttgctcgaaggcttgaagttcaatgggaccctctccccgctttctacaaactggttcctttatttttatgtttatttatttgggacggggtctggctctgtcacccaggctggagtgcagtggtgcaatcactgctcactgcagcatccacctcccagcgtccacccatcctcctggcctcagcctccggaacagctggggtacaggtacgccccagcccgaacaggttttcactaggttgcctgggctctttctttctttgtctgtgtttgtttgttggttggttggttggttggttggtttttgtttgtttgtttcgagacggggctccggctctgccgccgggggctgcagtgcaatggcgcgatctcacctcactgcggccttctgggctcaagcgatcctcccactgtgcccggcctgaagacagcctttagagaaagaagcagggggagttcttccgaggacagacaagatttctggagtttggaaagggtgagagactgggtcagcgaaaggaacattccggtctttatgttgggatgcaacgtatagatacagggatgagacccaaaagagccggcagaggtttgtcatcgtgctcgcaaggcaactgccggtggctgatcccgtaaaggatacacatacctagagcggagcctaaagatgcatccagcatgacgggtggagccacgatgcttggactcgagctctgctcctgtgcgttccgtgatcaatggcttatactacctgcacctcagtttttcccgggcaaaaaaggaagcttgctgccggtgcgttggcacctgccttaaagtgccagctactcagcgggctgaagaggaagaagttcctactaggaagacacgtggacacgtatgtttactgcagcactatttacaatagcaaagacttggaaccaactcgaatgcccatgaatgataggctggataaagaaagtgtggcacgtatacagcatggaattactacgcagccataaaaaaggatgagttcatgacctctgcgggaacgtggatgaagctggaaggcctcattctcagcaaactgacacaggaagcgaaaaccaaacaccgcatgttctcgctcctaagtgggagttgaacagcgagaacacatgggacacagggaggggaacatcacacgccgggccctgacggggcgtggggggcaaggggagagagagcattaggacaaatagccaacgcatgcggggcttcaaacctagacgactggtggataggtgcagcaaagcaccgtggcacacgtgtacctatgttccaaacctgcacgtcctgcacatgtaccccagaacttgggagggggtgggggaaaccaaaagagcgagggagaggcggggggggggaagagagagagagagggaaagagagagagagacagagagaggagagagagagagagagagagagagagagagagacagagagagagacagagagacagagacagacacagagagacggagagacagagagagagagagagaaagagagagagagagagagagagagagagagagacaggagaaagaagaactccgggtgggtcccattcctttaaaaggtcgccacccactcgactgccaagctgagatcctaaggacctccccaaaggaggaggtcatggccttcccaaagcgcagtagccacggtggaaacgaaagcgtgccgcataagcctaccgtctaccgcccacacatcaggaacctcaaggtacttcagggaagcagttaagtcaagccggcgcgtcacaggcactcggcgtgcaagccgccccgcaggtgctaccgtctcttacctccctctacttttaggaaacacgttgtatccccggagggggtgcaccgttcctggaggtactgcaataccaggtcgatgcgtggagtggacggagcaagctcctattccatctccctgctccaaaaatccatttaatatattgtcctcggatagaggacgtatcagatattaaactgataagaacagatactacacttgatcttagccaaaaggccgagaagcgatgcgctcgccttcgcgcccgccgtcaccgtcccactctcatccacattcaagtcgcggtgagagccccagcctcgctccttgccccattccctctgtctcgtccacagcgctattgacgcccttacactctcgggctgatttcttattctccgcctttgaaaagggaaatcttacacccgtgcttcttccggcgttcccgggctttcatttcgaatttgcatgccccgccctttcacagagggcgtggcctccgccgttgactccgcccccggggccgcctctgcctgggggagccggggctccgctgggggcgacttccttgttcgaatcgagcccccgaaaaaacagacccggaagagaccgggcgcgaatgcgaccgggttctgtggaagataactgtcgacagagagcggaccccgttttcctgaagaaagaccaagccccaatgcaggagcgcgggctgcgctggacctttacatcgccacccgctgtcggagagaccggccccgtacccgaggggacgaggggacgaggggcccatgcccagtcagggaagccgaaggcctggaggggcttccgggagcaggggctggagttcctctgccaggcaggaggctggcaccagacacccggcagagggaggcggcgagggcccagcaaggattctccccagcccctgtgcctgcgtctcctgcggcttctgtgcgcggaccgtgtcctgtgctgtgtagggaacgctgcctctctgctcgggacgtggattcctttcccctcctcctcgcccggctacttctgacgcaggtcgtcaggactccgcttgggtgtcacccgtgcaggaagcctcccttagtcaagggccctcggcacccgccccatatgtgactagcagccctcctgtgtatttcatcgcgcccccgttgtttatatcagccattccactcaccacccttctgggcaaccctttatctcccgctctgaaatcccatcgctgagggctgggacccctcctcagtgcttatccctgtttccccgcgcgagtctggcgcctggcgtgtggaaggcgctcagtaaacgtttgtggagcgaagaaacgacgcaaaggtgatgagcacgacgcagttaggaggctattggcccggcgcgggggaaaagggggaaggtcgggctcggggtggcaggaccccagagggcaggggtggctgccggggtgctcttggggcaaggtgggcgtcaaggcccccagcaaggttgggataaagtttctctccgaggcacagactgccgcctgcgggctcagcatttacctctcccttcctccttcctaacgcaacttcagcggagggctgagggctctactgcgcattacctggaaaacttatttcactccacggccctaagaggtgggccttattattagccacggccagggttagggtgaggccactcctccagggcagaatttcagggggtgcccacccccccgccctaaatcattcagcaatcaacataaattatagttcaacgcaatgtatcttatcttgtgggccgcaagccacccaggtgcccaggcaagagcctgaaggcacaagctgttccagtacagcgaagaaaataattagaataagaaaagttttactagagataggaaacggataggattatatctgactattattaatcattagtttgtagcatcactctttgttctattaccataatgatctctgttctattatgattaccttgggggaaaccaggccacacagagttaggagctgaagggccacagtgagaggtgaccagaagacgagagtgtgagccctcattcacgcccagagaagggccgctggagggctccttggcctagcggtaatgccagtgcctgggaagggccctggtttacttagcaggccttggtctagcggtggccccagtgcctgggaaggcacccgttacttagcagacccgggaaaggaaatctcccctctctccaggggagacagaagaacgctcggctcaacactcttgtggggaggtctgacattagccaggccggcccgcagtcatccggaggctccaatttaaggttcagtgtgatgctgtgcttcagtggtcacgctccttgttcactttcatgttcagcctgtacacctggctcctccttttaagttcttagaagacagcagtagcagaactagtaggagtaccacagtcttcgatctttctgataagtgcatagaagaaacgctgacgtttgctgtcctccctctccacctcggctaccacaaagggaaaggccccctgtccagtggacacgtgactcgcgtgacctatcgatcattggagatgactggcactccttaccctgcccccttgccttgactacaataaatagcagcgcctccaggcactcggggccactacctgtctgtctccgcgctttggtggcagtggtcccccgggcccagctgtctttcttcctatctctttgtcttctgtctttatctcttcgatctctcgtctccgcacacacgcgaagagaaaacccacagacccggtaggggtggaccctacattatctcagctacaacataatcaggatattcacgtggactactgagtctttcggtgcccccttgctgttttagttttgtcctgcggccgagtgtttccctcgcttcacgccaacacaatctccgccgccctgtcttgtcatccccattctacagcccagcacggtgtagtatggcagccgctagccacaggtatctagggagccctggaaatgtggtcagttctaatggagctgtgctgtaagtgtgaaatacacgtgggattttgacggcagtgggagcaaaattctcccaattttttttttttttttttttttttcagacggaggttccgctcttgttacccagcctggagtccaatgggcgcgatctaggctctctgcaacctccgcctcccgggttcaagcgattcccctgcctcagcctcccgagcagctgggactacaggcatgtgccaccacgcccggctaactttgtattttttagtacagatggggtttctccacgttgctcaggctggtctccaactcccgacctccggtgatctgcccagctgccgcctcccaaagtgttgctttcgattacaggcttgagccaccgctcaccctggcttttttttttttttttcttatgttagtatacagcgtatagatacaggtattatacccaaaagagccgacagaggtttgtcatcgtgcgcgcaaggcaactaccggtggctgatcccgtaaaggatacacatacctagagcggagcctaaaaatgcatccagcatgacgggtggagccacgatgcttggactcgagctctgctcctgtgcgttccgtgatcaatggcttatactacctgcacctcagtttttcccgggcaaaaaaggaagcttgctgccggtgcgttggcacctgccttaaagtgccagctactcagcgggctgaagaggaagtagttcctcttaggaagacacgtggacaggtttgtcactgcagcattattttcaatagcaaagtctgggtccccactggaatgcccatgaatgataggctggataaagaaagagtggcaggtatacatcatggaaaaactaagcagcccataaaaaaagggatgagttcatgacctctgcgggaacgtggatgaaggctggaaggcctcattctcagcaaactgacacaggaagggaaaaaccaaacaccgcatgttctcgctcttagtgggagttgaacagcgagaacacatgggacacagggaggggaacatcacacgccgggccctgacggggcgtggggggcaaggggagagagagcattaggacaaatagccaacgcatgcggggcttcaaacctagacgactggtggataggtgcagcaaagcaccgtggcacacgtgtacctatgttccaaacctgcacgtcctgcacatgtaccccagaacttgggagggggtgggggaaaccaaaagagcgagggagaggcgggggggggggaagagagagagagagggaaagagagagagagacagagagaggagagagagagagagagagagagagagagagagacagagagagagacagagagacagagacagacacagagagacggagagacagagagagagagagagaaagagagagagagagagagagagagagagagagacaggagaaagaagaactccgggtgggtcccattcctttaaaaggtcgccacccactcgactgccaagctgagatcctaaggacctccccaaaggaggaggtcatggccttcccaaagcgcagtagccacggtggaaacgaaagcgtgccgcataagcctaccgtctaccgcccgcacatcaggaacctcaaggtacttcagggaagcagttaagtcaagccggcgcgtcacaggcactcggcgtgcaagccgccccgcaggtgctaccgtctcttacctccctctacttttaggaaacacgttgtatccccggagggggtgcaccgttcctggaggtactgcaataccaggtcgatgcgtggagtggacggagcaagctcctattccatctccctgctccaaaaatccatttaatatattgtcctcggatagaggacgtatcagatattaaactgataagaacagatactacacttgatcttagccaaaaggccgagaagcgatgcgctcgccttcgcgcccgccgtcaccgtcccactctcatccacattcaagtcgcggtgagagccccagcctcgctccttgccccattccctctgtctcgtccacagcgctattgacgcccttacactctcgggctgatttcttattctccgccttttgaaaagggaaatcttacacccgtgcttcttccggcgttcccggggctttcattttcgaatttgcatgcccccgccctttcacagagggcggtgggcctccgccgttgactccgcccccaaagagcccggcagagggttttgtcatcgtgctcgcaagtgcaactgccggtggctgatccccgtaaaggatacacatgccttgagcggagcctaaagatgcatccagcatgacggggtggagcccacgatgcttgggactcgagctttggctcctgtgcgttccgtgatcaatggcttatactacctgcacctcagtttttcccgggcaaaaaaaggaagcttgctgccggtgcgttggcacctgccttaaagtgccagctactcagcgggctgaagaggaagaagttcctactaggaagacacgtggacacgtatgtttactgcagcactatttacaatagcaaagacttggaaccaactcgaatgcccatgaatgataggctggataaagaaagtgtggcacgtatacagcatggaattactacgcagccataaaaaaggatgagttcatgacctctgcgggaacgtggatgaagctggaaggcctcattctcagcaaactgacacaggaagcgaaaaccaaacaccgcatgttctcgctcctaagtgggagttgaacagcgagaacacatgggacacagggaggggaacatcacacgccgggccctgacggggcgtggggggcaaggggagagagagcattaggacaaatagccaacgcatgcggggcttcaaacctagacgactggtggataggtgcagcaaagcaccgtggcacacgtgtacctatgttccaaacctgcacgtcctgcacatgtaccccagaacttgggagggggtgggggaaaccaaaagagcgagggagaggcggggggggggaaagagagggagagagggaaagagagagagagacaggagagaggagagagagagagagagagagagacagagagacagagacagacacagagagacggagagacagagagagagagagagagagagagagacaggagaaagaagaactccgggtgggtcccattcctttaaaaggtcgccacccactcgactgccaagctgagatcctaaggacctccccaaaggaggaggtcgtggccttcccaaagcgcagtagccacggtggaaacgaaagcgtgccgcataagcctaccgtctaccgcccgcacatcaggaacctcaaggtacttcagggaagcagttaagtcaagccggcgcgtcacaggcactcggcgtgcaagccgccccgcaggtgctaccgtctcttacctccctctacttttaggaaacacgttgtatccccggagggggtgcaccgttcctggaggtactgcaataccaggtcgatgcgtggagtggacggagcaagctcctattccatctccctgctccaaaaatccatttaatatattgtcctcggatagaggacgtatcagatattaaactgataagaacagatactacacttgatcttagccaaaaggccgagaaagcgatgcgctcgccttcgcgcccgccgtcaccgtcccactctcatccacattcaagtcgcggtgagagccccagcctcgctccttgccccattccctctgtctcgtccacagcgctattgacgcccttacactctcgggctgatttcttattctccgccttgaaaagggaaatctacacccgtgcttcttccggcgttcccgggctttcatttcgaatttgcatgccccgccctttcacagagggcgtggcctccgccgttgactccgcccccggggccgcctctgcctgggggagccggggctccgctgggggcgacttccttgttcgtatcgagccagcgaaaagacagaaccggaagagaccgggggcgaaggcgacaggggtctgtggaagagacctgtcggcggagagcggtccacgttttcctggagaaagacgaggccccagggcaggagcgcgggctgcgctgggcctttacttcgccgcccgcgggcggggagaccggccccgtacccgaggggacgaggggacgaggggcccatgcccagtcagggaagccgaaggcctggaggggcttccgggagcaggggctggagttcctctgccaggcaggaggctggcaccagacacccggcagagggaggcggcgagggcccagcaaggattctccccagcccctgtgcctgcgtctcctgcggcttctgtgcgcggaccgtgtcctgtgctgtgtagggaacgctgcctctctgctcgggacgtggattcctttcccctcctcctcgcccggctacttctgacgcaggtcgtcaggactccgcttgggtgtcacccgtgcaggaagcctcccttagtcaagggccctcggcacccgccccatatgtgactagcagccctcctgtgtatttcatcgcgcccccgttgtttatatcagccattccactcaccacccttctgggcaaccctttatctcccgctctgaaatcccatcgctgagggctgggacccctcctcagtgcttatccctgtttccccgcgcgagtctggcgcctggcgtgtggaaggcgctcagtaaacgtttgtggagcgaagaaacgacgcaaaggtgatgagcacgacgcagttaggaggctattggcccggcgcgggggaaaagggggaaggtcgggctcggggtggcaggaccccagagggcaggggtggctgccggggtgctcttggggcaaggtgggcgtcaaggcccccagcaaggttgggataaagtttctctccgaggcacagactgccgcctgcgggctcagcatttacctctcccttcctccttcctaacgcaacttcagcggagggctgagggctctactgcgcattacctggaaaacttatttcactccacggccctaagaggtgggccttattattagccatggccagggttagggtgaggccactcctccagggcagaatttcagggggtgcccacccccccgccctaaatcattcagcaatcaacataaattatagttcaacgcaatgtatcttatcttgtgggccgcaagccacccaggtgcccaggcaagagcctgaaggcacaagctgttccagtacagcgaagaaaataattagaataagaaaagttttactagagataggaaacggataggattatatctgactattattaatcattagtttgtagcatcactctttgttctattaccataatgatctctgttctattatgattaccttgggggaaaccaggccacacagagttaggagctgaagggccacagtgagaggtgaccagaagacgagagtgtgagccctcattcacgcccagagaagggccgctggagggctccttggcctagcggtaatgccagtgcctgggaaggccctggttacttagcaggccttggtctagcggtggccccagtgcctgggaaggcacccgttacttagcagacccggaaagggaatctccctctctccaggagagacagagtgtgagccactgtgcccggctgggagcaagactggagcaagactccatctcaaaaaaataaaataaaataaataagtgaattaattaattaaaggccaggcatggtggttcacacttgtcaacattttgggagacttaggtgggaggattgcttgagtccaggagttccagaccagccagggcaacatagtgagaccctgtctgtattacaataataaaatcaaataaagtttttaatttttttttgagacaagagtctcactctatcactcaggtcagagtgcagtggcactatcttggctcactgcaacctccacctcactgattcaagtgattctcatgcctcagtctccccaggtagctggaattccaggcaagcgccaccatgcctagctactttttgtacttttagtagagaccaggtttcgccatgttggccaggctggtcttgaactcctgacctcctctgatccacccaccttggcctcccaaagtgctggattaactttaaccaccatgcccggccaaaataacattgtaaaaactaaattaaattatataatgacgtttgctgtcctccctctccacctcggctaccacaaagggaaaggccccctgtccagtggacacgtgactcgcgtgacctatcgatcattggagatgactggcactccttaccctgcccccttgccttgactacaataaatagcagcgcctccaggcactcggggccactacctgtctgtctccgcgctttggtggcagtggtcccccgggcccagctgtctttcttcctatctctttgtcttctgtctttatctcttcgatctctcgtctccgcacacacgcgaagagaaaacccacagacccggtaggggtggaccctacattatctcagctacaacataatcaggatattcacgtggactactgagtctttcggtgcccccttgctgttttagttttgtcctgcggccgagtgtttccctcgcttcacgccaacacaatctccgccgccctgtcttgtcatccccattctacagcccagcacggtgtagtatggcagccgctagccacaggtatctagggagccctggaaatgtggtcagttctaatggagctgcgctgttaagtgtgaaatacacatgggattttgacggcagtgggagcaaaattctcccaatttttttttttttttttttttttttcagacggaggttccgctcttgttacccagcctggagtccaatggcgcgatctaggctctctgcaacctccgcctcccgggttcaagcgattcccctgcctcagcctcccgagcagctgggactacaggcatgtgccaccacgcccggctaactttgtatttttagtacagatggggtttctccacgttgctcaggctggtctccaactcccgacctccggtgatctgcccagctgccgcctcccaaagtgttgcttgcgattacaggcttgagccaccgctcaccctggcttttttttttttttttttccaaacaaactctcgctctgtcgcccaggctgggagtgcagtggcgcgatctcggctcactgcagcctctacctcccgggttccagcgattctcctgcctcagcctcctgggtagctgggattacaggcgcaggccaccacgcccggctaatttttgtatttttagggggtttcgccatgtcggccaggctggtctcgagctcctgacctcaggcgatccgcccgcctcggcctcccaaagcgctgggattacaggcgtaagccaccgcgccgggctctttcattctgtctttattttctgagatcgagtctcgctcggccgctcaggttggactgcaacggcgtgatctcggctcgctgaaaaggcctcattctcagcaaactgacacaggaagcgaaaaccaaacaccgcatgttctcgctcctaagtgggagttgaacagcgagaacacatgggacacagggaggggaacatcacacgccgggccctgacggggcgtggggggcaaggggagagagagcattaggacaaatagccaacgcatgcggggcttcaaacctagacgactggtggataggtgcagcaaagcaccgtggcacacgtgtacctatgttccaaacctgcacgtcctgcacatgtaccccagaacttgggagggggtgggggaaaccaaaagagcgagggagaggcgggggggggggaaagagagggagagagggaaagagagagagagacaggagagaggagagagagagagagagagagagagagagagagagacagagagagagacagagagacagagacagacacagagagacggagagacagagagagagagagagagagagagagacaggagaaagaagaactccgggtgggtcccattcctttaaaaggtcgccacccactcgactgccaagctgagatcctaaggacctccccaaaggaggaggtcgtggccttcccaaagcgcagtagccacggtggaaacgaaagcgtgccgcataagcctaccgtctaccgcccgcacatcaggaacctcaaggtacttcagggaagcagttaagtcaagccggcgcgtcacaggcactcggcgtgcaagccgccccgcaggtgctaccgtctcttacctccctctacttttaggaaacacgttgtatccccggagggggtgcaccgttcctggaggtactgcaataccaggtcgatgcgtggagtggacggagcaagctcctattccatctccctgctccaaaaatccatttaatatattgtcctcggatagaggacgtatcagatattaaactgataagaacagatactacacttgatcttagccaaaaggccgagaagcgatgcgctcgccttcgcgcccgccgtcaccgtcccactctcatccacattcaagtcgcggtgagagccccagcctcgctccttgccccattccctctgtctcgtccacagcgctattgacgcccttacactctcgggctgatttcttattctccgcctttgaaaagggaaatcttacacccgtgcttcttccggcgttcccgggctttcatttcgaatttgcatgccccgccctttcacagagggcgtggcctccgccgttgactccgcccccggggccgcctctgcctgggggagccggggctccgctgggggcgacttccttgttcgtatcgagccagcgaaaagacagaaccggaagagaccgggggcgaaggcgacaggggtctgtggaagagacctgtcggcggagagcggtccacgttttcctggagaaagacgaggccccagggcaggagcgcgggctgcgctgggcctttacttcgccgcccgcgggcggggagaccggccccgtacccgaggggacgaggggacgaggggcccatgcccagtcagggaagccgaaggcctggaggggcttccgggagcaggggctggagttcctctgccaggcaggaggctggcaccagacacccggcagagggaggcggcgagggcccagcaaggattctccccagcccctgtgcctgcgtctcctgcggcttctgtgcgcggaccgtgtcctgtgctgtgtagggaacgctgcctctctgctcgggacgtggattcctttcccctcctcctcgcccggctacttctgacgcaggtcgtcaggactccgcttgggtgtcacccgtgcaggaagcctcccttagtcaagggccctcggcacccgccccatatgtgactagcagccctcctgtgtatttcatcgcgcccccgttgtttatatcagccattccactcaccacccttctgggcaaccctttatctcccgctctgaaatcccatcgctgagggctgggacccctcctcagtgcttatccctgtttccccgcgcgagtctggcgcctggcgtgtggaaggcgctcagtaaacgtttgtggagcgaagaaacgacgcaaaggtgatgagcacgacgcagttaggaggctattggcccggcgcgggggaaaagggggaaggtcgggctcggggtggcaggaccccagagggcaggggtggctgccggggtgctcttggggcaaggtgggcgtcaaggcccccagcaaggttgggataaagtttctctccgaggcacagactgccgcctgcgggctcagcatttacctctcccttcctccttcctaacgcaacttcagcggagggctgagggctctactgcgcattacctggaaaacttatttcactccacggccctaagaggtgggccttattattagccacggccagggttagggtgaggccactcctccagggcagaatttcagggggtgcccaaccccccgccctaaatcattcagcaatcaacataaattatagttcaacgcaatgtatcttatcttgtgggccgcaagccacccaggtgcccaggcaagagcctgaaggcacaagctgttccagtacagcgaagaaaataattagaataagaaaagttttactagagataggaaacggataggattatatctgactattattaatcattagtttgtagcatcactctttgttctattaccataatgatctctgttctattatgattaccttgggggaaaccaggccacacagagttaggagctgaagggccacagtgagaggtgaccagaagacgagagtgtgagccctcattcacgcccagagaagggccgctggagggctccttggcctagcggtaatgccagtgcctgggaaggccctggttacttagcaggccttggtctagcggtggccccagtgcctgggaaggcacccgttacttagcagacccggaaagggaatctccctctctccaggggagacagagaacgctccgctccaccacctcttgtgggaggtctgacattagccaggccggcccgcagtcatccggaggctccaacgtctgtctccctgtgatgctgtgcttcagtggtcacgctccttgttcactttcatgttcagcctgtacacctggctcctccttttaagttcttagaagacagcagtagcagaactagtaggagtaccacagtctttcgatctttctgataagtgcatagaagaaacgctgacgtttgctgtcctccctctccacctcggctaccacaaagggaaaggccccctgtccagtggacacgtgactcgcgtgacctatcgatcattggagatgactggcactccttaccctgcccccttgccttgactacaataaatagcagcgcctccaggcactcggggccactacctgtctgtctccgcgctttggtggcagtggtcccccgggcccagctgtctttcttcctatctctttgtcttctgtctttatctcttcgatctctcgtctccgcacacacgcgaagagaaaacccacagacccggtaggggtggaccctacattatctcagctacaacataatcaggatattcacgtggactactgagtctttcggtgcccccttgctgttttagttttgtcctgcggccgagtgtttccctcgcttcacgccaacacaatctccgccgccctgtcttgtcatccccattctacagcccagcacggtgtagtatggcagccgctagccacaggtatctagggagccctggaaatgtggtcagttctaatggagctgtgctgtaagtgtgaaatacacgtgggattttgacggcagtgggagcaaaattctcccaattttttttttttttttttttttttcagacggaggttccgctcttgttacccagcctggagtccaatggcgcgatctaggctctctgcaacctccgcctcccgggttcaagcgattcccctgcctcagcctcccgagcagctgggactacaggcatgtgccaccacgcccggctaactttgtatttttagtacagatggggtttctccacgttgctcaggctggtctccaactcccgacctccggtgatctgcccagctgccgcctcccaaagtgttgcttgcgattacaggcttgagccaccgctcaccctggctttttttttttttttttccagacaaactctcgctctgtcgcccaggctggagtgcagtggcgcgatctcggctcactgcagcctctacctcccgggttccagcgattctcctgcctcagcctcctgggtagctgggattacaggcgcaggccaccacgcccggctaatttttgtatttttagggggtttcgccatgtcggccaggctggtctcgagctcctgacctcaggcgatccgcccgcctcggcctcccaaagcgctgggattacaggcgtaagccaccgcgccgggctctttcattctgtctttattttctgagatagagtctcgctcggacgctcaggttggactgcaacggcgtgatctcggctcgctgaaacttccgcctcccgggttcaagcgattctcctgtctcagcctcccgagtagctgggattattgacgggcagcaccacgcccggctactttttgtggtttttgtatcttctgtcttctgctctttagtaccgcatagagccgcagaagactagcgagtcgaacaaacggcccctcttgcagcagttgttgatcacggggctgccccccggtactcatcctgtgtctctcgtccaaatccccgctcctcctcagctatcacctctgccgatgctggtggtttccctgggtaccgggaaccaaactctcattccccaggggcctaagccccccgtggccaggcccttctcaagtcagggttcctgcacattcacagttacgggtggccctgggagtaacacctggcacccaaacaggtcaccagagtccacacatagtccacctgccctccctgcgtaagatcagctcttcctcctcccgacgatagatcagggtcaatgatccctgccaagatggcgactgctccagcctgctggtccaacctgtccagccacagctgttgctcgaaggcttgaagttcaatgggaccctctcccgctttctacaaactggttcctttatttttatgtttatttatttgggacggggtctggctctgtcacccaggctggagtgcagtggtgcaatcactgctcactgcagcatccacctcccagcgtccacccatcctcctggcctcagcctccggaacagctggggtacaggtatgccccagcccgaacaggttttcactaggttgcctgggctctttctttctttgtctgtgtttgtttgttggttggttggttggttggttggtttttgtttgtttgtttcgagacggggctccggctctgccgccgggggctgcagtgcaatggcgcgatctcacctcactgcggccttctgggctcaagcgatcctcccactgtgcccggcctgaagacagcctttagagaaagaagcagggggagttcttccgaggacagacaagatttctggagtttggaaagggtgagagactgggtcagcgaaaggaacattccggtctttatgttgggatgcaacgtatagatacagggatgagacccaaaagagccggcagaggtttgtcatcgtgctcgcaaggcaactgccggtggctgatcccgtaaaggatacacatacctagagcggagcctaaagatgcatccagcatgacgggtggagccacgatgcttggactcgagctctgctcctgtgcgttccgtgatcaatggcttatactacctgcacctcagtttttcccgggcaaaaaaggaagcttgctgccggtgcgttggcacctgccttaaagtgccagctactcagcgggctgaagaggaagaagttcctactaggaagacacgtggacacgtatgtttactgcagcactatttacaatagcaaagacttggaaccaactcgaatgcccatgaatgataggctggataaagaaagtgtggcacgtatacagcatggaattactacgcagccataaaaaaggatgagttcatgacctctgcgggaacgtggatgaagctggaaggcctcattctcagcaaactgacacaggaagcgaaaaccaaacaccgcatgttctcgctcctaagtgggagttgaacagcgagaacacatgggacacagggaggggaacatcacacgccgggccctgacggggcgtggggggcaaggggagagagagcattaggacaaatagccaacgcatgcggggcttcaaacctagacgactggtggataggtgcagcaaagcaccgtggcacacgtgtacctatgttccaaacctgcacgtcctgcacatgtaccccagaacttgggagggggtgggggaaaccaaaagagcgagggagaggcggggggggggaagagagagagagagggaaagagagagagagacagagagaggagagagagagagagagagagagagagagacagagagagagacagagagacagagacagacacagagagacggagagacagagagagagagagagaaagagagagagagagagagagagacaggagaaagaagaactccgggtgggtcccattcctttaaaaggtcgccacccactcgactgccaagctgagatcctaaggacctccccaaaggaggaggtcgtggccttcccaaagcgcagtagccacggtggaaacgaaagcgtgccgcataagcctaccgtctaccgcccgcacatcaggaacctcaaggtacttcagggaagcagttaagtcaagccggcgcgtcacaggcactcggcgtgcaagccgccccgcaggtgctaccgtctcttacctccctctacttttaggaaacacgttgtatccccggagggggtgcaccgttcctggaggtactgcaataccaggtcgatgcgtggagtggacggagcaagctcctattccatctccctgctccaaaaatccatttaatatattgtcctcggatagaggacgtatcagatattaaactgataagaacagatactacacttgatcttagccaaaaggccgagaagcgatgcgctcgccttcgcgcccgccgtcaccgtcccactctcatccacattcaagtcgcggtgagagccccagcctcgctccttgccccattccctctgtctcgtccacagcgctattgacgcccttacactctcgggctgatttcttattctccgcctttgaaaagggaaatcttacacccgtgcttcttccggcgttcccgggctttcatttcgaatttgcatgccccgccctttcacagagggcgtggcctccgccgttgactccgcccccggggccgcctctgcctgggggagccggggctccgctgggggcgacttccttgttcgtatcgagccagcgaaaagacagaaccggaagagaccgggggcgaaggcgacaggggtctgtggaagagacctgtcggcggagagcggtccacgttttcctggagaaagacgaggccccagggcaggagcgcgggctgcgctgggcctttacttcgccgcccgcgggcggggagaccggccccgtacccgaggggacgaggggacgaggggcccatgcccagtcagggaagccgaaggcctggaggggcttccgggagcaggggctggagttcctctgccaggcaggaggctggcaccagacacccggcagagggaggcggcgagggcccagcaaggattctccccagcccctgtgcctgcgtctcctgcggcttctgtgcgcggaccgtgtcctgtgctgtgtagggaacgctgcctctctgctcgggacgtggattcctttcccctcctcctcgcccggctacttctgacgcaggtcgtcaggactccgcttgggtgtcacccgtgcaggaagcctcccttagtcaagggccctcggcacctgccccatatgtgactagcagccctcctgtgtatttcatcgcgcccccgttgtttatatcagccattccactcaccacccttctgggcaaccctttatctcccgctctgaaatcccatcgctgagggctgggacccctcctcagtgcttatccctgtttccccgcgcgagtctggcgcctggcgtgtggaaggcgctcagtaaacgtttgtggagcgaagaaacgacgcaaaggtgatgagcacgacgcagttaggaggctattggcccggcgcgggggaaaagggggaaggtcgggctcggggtggcaggaccccagagggcaggggtggctgccggggtgctcttggggcaaggtgggcgtcaaggcccccagcaaggttgggataaagtttctctccgaggcacagactgccgcctgcgggctcagcatttacctctcccttcctccttcctaacgcaacttcagcggagggctgagggctctactgcgcattacctggaaaacttatttcactccacggccctaagaggtgggccttattattagccacggccagggttagggtgaggccactcctccagggcagaatttcagggggtgcccacccccccgccctaaatcattcagcaatcaacataaattatagttcaacgcaatgtatcttatcttgtgggccgcaagccacccaggtgcccaggcaagagcctgaaggcacaagctgttccagtacagcgaagaaaataattagaataagaaaagttttactagagataggaaacggataggattatatctgactattattaatcattagtttgtagcatcactctttgttctattaccataatgatctctgttctattatgattaccttgggggaaaccaggccacacagagttaggagctgaagggccacagtgagaggtgaccagaagacgagagtgtgagccctcattcacgcccagagaagggccgctggagggctccttggcctagcggtaatgccagtgcctgggaaggccctggttacttagcaggccttggtctagcggtggccccagtgcctgggaaggcacccgttacttagcagacccggaaagggaatctccctctctccaggggagacagagaacgctccgctccaccacctcttgtgggaggtctgacattagccaggccggcccgcagtcatccggaggctccaacgtctgtctccctgtgatgctgtgcttcagtggtcacgctccttgttcactttcatgttcagcctgtacacctggctcctccttttaagttcttagaagacagcagtagcagaactagtaggagtaccacagtcttcgatctttctgataagtgcatagaagaaacgctgacgtttgctgtcctccctctccacctcggctaccacaaagggaaaggccccctgtccagtggacacgtgactcgcgtgacctatcgatcattggagatgactggcactccttaccctgcccccttgccttgactacaataaatagcagcgcctccaggcactcggggccactacctgtctgtctccgcgctttggtggcagtggtcccccgggcccagctgtctttcttcctatctctttgtcttctgtctttatctcttcgatctctcgtctccgcacacacgcgaagagaaaacccacagacccggtaggggtggaccctacattatctcagctacaacataatcaggatattcacgtggactactgagtctttcggtgcccccttgctgttttagttttgtcctgcggccgagtgtttccctcgcttcacgccaacacaatctccgccgccctgtcttgtcatccccattctacagcccagcacggtgtagtatggcagccgctagccacaggtatctagggagccctggaaatgtggtcagttctaatggagctgcgctgttaagtgtgaaatacacatgggattttgacggcagtgggagcaaaattctcccaattttttttttttttttttttttttttcagacggaggttccgctcttgttacccagcctggagtccaatggcgcgatctaggctctctgcaacctccgcctcccgggttcaagcgattcccctgcctcagcctcccgagcagctgggactacaggcatgtgccaccacgcccggctaactttgtatttttagtacagatggggtttctccacgttgctcaggctggtctccaactcccgacctccggtgatctgcccagctgccgcctcccaaagtgttgcttgcgattacaggcttgagccaccgctcaccctggcttttttttttttttttccagacaaactctcgctctgtcgcccaggctggagtgcagtggcgcgatctcggctcactgcagcctctacctcccgggttccagcgattctcctgcctcagcctcctgggtagctgggattacaggcgcaggccaccacgcccggctaatttttgtatttttagggggtttcgccatgtcggccaggctggtctcgagctcctgacctcaggcgatccgcccgcctcggcctcccaaagcgctgggattacaggcgtaagccaccgcgccgggctctttcattctgtctttattttctgagatagagtctcgctcggacgctcaggttggactgcaacggcgtgatctcggctcgctgaaacttccgccctcccgggttcaagcgattctcctgtctcagcctcccgagtagctgggattattgacgggcagcaccacgccccggctactttttgtggtttttgtatcttctgtcttctgctctttagtaccgcatagagccgcagaagactagcgagtcgaacaaacggcccctcttgcagcagttgttgatcacggggctgccccccggtactcatcctgtgtctctcgtccaaatccccgctcctcctcagctatcacctctgccgatgctggtggtttccctgggtaccgggaaccaaactctcattccccaggggcctaagccccccgtggccaggcccttctcaagtcagggttcctgcacattcacagttacgggtggccctgggagtaacacctggcacccaaacaggtcaccagagtccacacatagtccacctgccctccctgcgtaagatcagctcttcctcctcccgacgatagatcagggtcaatgatccctgccaagatggcgactgctccagcctgctggtccaacctgtccagccacagctgttgctcgaaggcttgaagttcaatgggaccctctcccgctttctacaaactggttcctttatttttatgtttatttatttgggacggggtctggctctgtcacccaggctggagtgcagtggtgcaatcactgctcactgcagcatccacctcccagcgtccacccatcctcctggcctcagcctccggaacagctggggtacaggtacgccccagcccgaacaggttttcactaggttgcctgggctctttctttctttgtctgtgtttgtttgttggttggttggttggttggttggtttttgtttgtttgtttcgagacggggctccggctctgccgccgggggctgcagtgcaatggcgcgatctcacctcactgcggccttctgggctcaagcgatcctcccactgtgcccggcctgaagacagcctttagagaaagaagcagggggagttcttccgaggacagacaagatttctggagtttggaaagggtgagagactgggtcagcgaaaggaacattccggtctttatgttgggatgcaacgtatagatacagggatgagacccaaaagagccggcagaggtttgtcatcgtgctcgcaaggcaactgccggtggctgatcccgtaaaggatacacatacctagagcggagcctaaagatgcatccagcatgacgggtggagccacgatgcttggactcgagctctgctcctgtgcgttccgtgatcaatggcttatactacctgcacctcagtttttcccgggcaaaaaaggaagcttgctgccggtgcgttggcacctgccttaaagtgccagctactcagcgggctgaagaggaagaagttcctactaggaagacacgtggacacgtatgtttactgcagcactatttacaatagcaaagacttggaaccaactcgaatgcccatgaatgataggctggataaagaaagtgtggcacgtatacagcatggaattactacgcagccataaaaaaggatgagttcatgacctctgcgggaacgtggatgaagctggaaggcctcattctcagcaaactgacacaggaagcgaaaaccaaacaccgcatgttctcgctcctaagtgggagttgaacagcgagaacacatgggacacagggaggggaacatcacacgccgggccctgacggggcgtggggggcaaggggagagagagcattaggacaaatagccaacgcatgcggggcttcaaacctagacgactggtggataggtgcagcaaagcaccgtggcacacgtgtacctatgttccaaacctgcacgtcctgcacatgtaccccagaacttgggagggggtgggggaaaccaaaagagcgagggagaggcggggggggggaagagagagagagagggaaagagagagagagacagagagaggagagagagagagagagacagagagagagacagagagacagagacagacacagagagacggagagacagagagagagagagagagaaagagagagagagagagagagacaggagaaagaagaactccgggtgggtcccattcctttaaaaggtcgccacccactcgactgccaagctgagatcctaaggacctccccaaaggaggaggtcgtggccttcccaaagcgcagtagccacggtggaaacgaaagcgtgccgcataagcctaccgtctaccgcccgcacatcaggaacctcaaggtacttcagggaagcagttaagtcaagccggcgcgtcacaggcactcggcgtgcaagccgccccgcaggtgctaccgtctcttacctccctctacttttaggaaacacgttgtatccccggagggggtgcaccgttcctggaagtactgcaataccaggtcgatgcgtggagtggacggagcaagctcctattccatctccctgctccaaaaatccatttaatatattgtcctcggatagaggacgtatcagatattaaactgataagaacagatactacacttgatcttagccaaaaggccgagaagcgatgcgctcgccttcgcgcccgccgtcaccgtcccactctcatccacattcaagtcgcggtgagagccccagcctcgctccttgccccattccctctgtctcgtccacagcgctattgacgcccttacactctcgggctgatttcttattctccgcctttgaaaagggaaatcttacacccgtgcttcttccggcgttcccgggctttcatttcgaatttgcatgccccgccctttcacagagggcgtggcctccgccgttgactccgcccccggggccgcctctgcctgggggagccggggctccgctgggggcgacttccttgttcgtatcgagccagcgaaaagacagaaccggaagagaccgggggcgaaggcgacaggggtctgtggaagagacctgtcggcggagagcggtccacgttttcctggagaaagacgaggcccagggcaggagcgcgggctgcgctgggcctttacttcgccgcccgcgggcggggagaccggccccgtacccgaggggacgaggggacgaggggcccatgcccagtcagggaagcctaaggtctggaggggcttccgggagcaggggctggagttcctctgccaggcaggatgctggcaccagacacccggcagagggaggcggcgagggctcataaggaattctccccagcccctgtgcttgcgtctcctgcggtttctgtgctcggaccgtgtcctgtgctgtgtagggaacgctgcctctctgctcgggacgtggattcctttcccctcctcctcgcccggctacttctgacgcaggtcgtcaggactccgctttgtgtcacccgtgcagggaagcctcccttagtcaagggccctcgcacccgccccatatgtgactagcagccctcctgtgtatttcatcgcgcccccgttgtttatatcagccattccactcaccaccttctgggcaaccctttatctcccgctctgaaatcccatcgctgagggctggacccctcctcagtgcttatccctgtttccccgcgcgagtctggcgcctggcgtgtggaaggcgctcagtaaacgtttgtggagcgaagaaacgacgcaaaggtgatgagcacgacgccagttaggaggctattggccggcgcggggaaaaggggaaggtcgggctcggggtggcaggaccccagaggcaggggtggctgccgggtgctcttggggcaaggtgggcgtcaaggcccccagcaaggttgggataaagtttctctccgaggcacagactgccgctgcgggctcagcatttacctctcccttcctccttcctaacgcaacttcagcggagggctgagggctctactgcgcattacctggaaaacttatttcactccacggccctaagaggtgggccttattattagccatggccagggttagggtgaggccactcctccagggcagaatttcagggggtgcccacccccccgccctaaatcattcagcaatcaacataaattatagttcaacgcaatgtatcttatcttgtgggccgcaagccacccaggtgcccaggcaagagcctgaaggcacaagctgttccagtacagcgaagaaaataattagaataagaaaagttttactagagataggaaacggataggattatatctgactattattaatcattagtttgtagcatcactctttgttctattaccataatgatctctgttctattatgattaccttgggggaaaccaggccacacagagttaggagctgaagggccacagtgagaggtgaccagaagacgagagtgtgagccctcattcacgcccagagaagggccgctggagggctccttggcctagcggtaatgccagtgcctgggaaggccctggttacttagcaggccttggtctagcggtggccccagtgcctgggaaggcacccgttacttagcagacccggaaagggaatctccctctctccaggggagacagagaacgctccgctccaccacctcttgtgggaggtctgacattagccaggccggcccgcagtcatccggaggctccaacgtctgtctccctgtgatgctgtgcttcagtggtcacgctccttgttcactttcatgttcagcctgtacacctggctcctccttttaagttcttagaagacagcagtagcagaactagtaggagtaccacagtcttcgatctttctgataagtgcatagaagaaacgctgacgtttgctgtcctccctctccacctcggctaccacaaagggaaaggccccctgtccagtggacacgtgactcgcgtgacctatcgatcattggagatgactggcactccttaccctgcccccttgccttgactacaataaatagcagcgcctccaggcactcggggccactacctgtctgtctccgcgctttggtggcagtggtcccccgggcccagctgcctttcttcctatctctttgtcttctgtctttatctcttcgatctctcgtctccgcacacacgcgaagagaaaacccacagacccggtaggggtggaccctacattatctcagctacaacataatcaggatattcacgtggactactgagtctttcggtgcccccttgctgttttagttttgtcctgcggccgagtgtttccctcgcttcacgccaacacaatctccgccgccctgtcttgtcatccccattctacagcccagcacggtgtagtatggcagccgctagccacaggtatctagggagccctggaaatgtggtcagttctaatggagctgtgctgtaagtgtgaaatacacgtgggattttgacggcagtgggagcaaaattctcccaatttttttttttttttttttttttcagacggaggttccgctcttgttacccagcctggagtccaatggcgcgatctaggctctctgcaacctccgcctcccgggttcaagcgattcccctgcctcagcctcccgagcagctgggactacaggcatgtgccaccacgcccggctaactttgtatttttagtacagatggggtttctccacgttgctcaggctggtctccaactcccgacctccggtgatctgcccagctgccgcctcccaaagtgttgcttgcgattacaggcttgagccaccgctcaccctggctttttttttttttttttccagacaaactctcgctctgtcgcccaggctggagtgcagtggcgcgatctcggctcactgcagcctctacctcccgggttccagcgattctcctgcctcagcctcctgggtagctgggattacaggcgcaggccaccacgcccggctaatttttgtatttttagggggtttcgccatgtcggccaggctggtctcgagctcctgacctcaggcgatccgcccgcctcggcctcccaaagcgctgggattacaggcgtaagccaccgcgccgggctctttcattctgtctttattttctgagatagagtctcgctcggacgctcaggttggactgcaacggcgtgatctcggctcgctgaaacttccgcctcccgggttcaagcgattctcctgtctcagcctcccgagtagctgggattattgacgggcagcaccacgcccgggctactttttgtggtttttgtatcttctgtcttctgctctttagtaccgcatagagccgcagaagactagcgagtcgaacaaacggcccctcttgcagcagttgttgatcacggggctgccccccgggtactcatcctgtgtctctcgtccaaatccccgctcctcctcagctatcacctctgccgatgctggtggtttccctgggtaccggaaccaaactctcattccccgagcctaagccccccgtgccaggcccttctcaagtcagggttcctgcacattcacagttacgggtggccctgggagtaacacctggcacccaaacaggtcaccagagtccacacatagtccacctgccctccctgcgtaagatcagctcttcctcctcccgacgatagatcagggtcaatgatccctgccaagatggcgactgctccagcctgctggtccaacctgtccagccacagctgttgctcgaaggcttgaagttcaatgggaccctctcccgctttctacaaactggttcctttatttttatgtttatttatttgggacggggtctggctctgtcacccaggctggagtgcagtggtgcaatcactgctcactgcagcatccacctcccagcgtccacccatcctcctgcctcagcctccggaacagctggggtacaggtacgccccagcccgaacaggttttcactaggttgcctgggctctttctttctttgtctgtgtttgtttgttggttggttggttggttggttggtttttgtttgtttgtttcgagacggggctccggctctgccgccgggggctgcagtgcaatggcgcgatctcacctcactgcggccttctgggctcaagcgatcctcccactgtgcccggcctgaagacagcctttagagaaagaagcagggggagttcttccgaggacagacaagatttctggagtttggaaagggtgagagactgggtcagcgaaaggaacattccggtctttatgttgggatgcaacgtataggtacagggatgagacccaaaagagccggcagaggtttgtcatcgtgctcgcaaggcaactgccggtggctgatcccgtaaaggatacacatacctagagcggagcctaaagatgcatccagcatgacgggtggagccacgatgcttggactcgagctctgctcctgtgcgttccgtgatcaatggcttatactacctgcacctcagtttttcccgggcaaaaaaggaagcttgctgccggtgcgttggcacctgccttaaagtgccagctactcagcgggctgaagaggaagaagttcctactaggaagacacgtggacacgtatgtttactgcagcactatttacaatagcaaagacttggaaccaactcgaatgcccatgaatgataggctggataaagaaagtgtggcacgtatacagcatggaattactacgcagccataaaaaaggatgagttcatgacctctgcgggaacgtggatgaagctggaaggcctcattctcagcaaactgacacaggaagcgaaaaccaaacaccgcatgttctcgctcctaagtgggagttgaacagcgagaacacatgggacacagggaggggaacatcacacgccgggccctgacggggcgtggggggcaaggggagagagagcattaggacaaatagccaacgcatgcggggcttcaaacctagacgactggtggataggtgcagcaaagcaccgtggcacacgtgtacctatgttccaaacctgcacgtcctgcacatgtaccccagaacttgggagggggtgggggaaaccaaaagagcgagggagaggcgggggggggaaagagagagagagagggaaagagagagagagacagagagaggagagagagagagagagacagagagagagacagagagacagagacagacacaagagacggagagacagagagagagagagagagaaagagagagagagagagagagacaggagaaagaagaactccgggtgggtcccattcctttaaaaggtcgccacccactcgactgccaagctgagatcctaaggacctccccaaaggaggaggtcgtggccttcccaaagcgcagtagccacggtggaaacgaaagcgtgccgcataagcctaccgtctaccgcccgcacatcaggaacctcaaggtacttcagggaagcagttaagtcaagccggcgcgtcacaggcactcggcgtgcaagccgccccgcaggtgctaccgtctcttacctccctctacttttaggaaacacgttgtatccccggagggggtgcaccgttcctggaggtactgcaataccaggtcgatgcgtggagtggacggagcaagctcctattccatctccctgctccaaaaatccatttaatatattgtcctcggatagaggacgtatcagatattaaactgataagaacagatactacacttgatcttagccaaaaggccgagaagcgatgcgctcgccttcgcgcccgccgtcaccgtcccactctcatccacattcaagtcgcggtgagagccccagcctcgctccttgccccattccctctgtctcgtccacagcgctattgacgcccttacactctcgggctgatttcttattctccgcctttgaaaagggaaatcttacacccgtgcttcttccggcgttcccgggctttcatttcgaatttgcatgccccgccctttcacagagggcgtggctccgcgttgactccgcccccgggcgcgcctctgcctgggggagccggggctcgctgggggcgacttccttgttcgtatcgagccagcgaaaagacagaaccggaagagaccgggggcgaaggcgacaggggtctgtggaagagacctgtcggcggagagcggtccacgttttcctggagaaagacgaggccccaggcgaggagcgcgggctgctggggcctttacttcgccgcccgcggcagacccggccccgtacccgagggacgagggacgaggggcccatgcccagtcagggaagccgcacgtggaggggcttccgggagcaggggctggagttcctctgccaggcaggaggctggcaccagacacccggcagagggaggcggcgagggccagcaaggattctccccagcccctgtgcctgcgtctcctgcggcttctgtgcgcggaccgtgtcctgtgctgtgtagggaacgctgcctctctgctcgggacgtggattcctttcccctcctcctcgcccggctacttctgacgcaggtcgtcaggactccgcttgggtgtcacccgtgcaggaagcctcccttagtcaagggccctcggcacccgccccatatgtgactagcagccctcctgtgtatttcatcgcgcccccgttgtttatatcagccattccactcaccacccttctgggcaaccctttatctcccgctctgaaatcccatcgctgagggctgggacccctcctcagtgcttatccctgtttccccgcgcgagtctggcgcctggcgtgtggaaggcgctcagtaaacgtttgtggagcgaagaaacgacgcaaaggtgatgagcacgacgcagttaggaggctattggcccggcgcgggggaaaagggggaaggtcgggctcggggtggcaggaccccagagggcaggggtggctgccggggtgctcttggggcaaggtgggcgtcaaggcccccagcaaggttgggataaagttcctttccgaggcacagactgccgcctgcgggctcagcatttacctttccctttctccttccttacctccctctccacctcggctaccacaaagggaaaggccccctgtccagtgcacacgtgactcgcgtgacctatcgatcattggagatgactggcactccttaccctgcccccttgccttgactacaataaatagcagcgcctccaggcactcggggccactacctgtctgtctccgcgctttggtggcagtggtcccccgggcccagctgtctttcttcctatctctttgtcttctgtctttatctcttcgatctctcgtctccgcacacacgcgaagagaaaacccacagacccggtaggggtggaccctacattatctcagctacaacataatcaggatattcacgtggactactgagtctttcggtgcccccttgctgttttagttttgtcctgcggccgagtgtttccctcgcttcacgccaacacaatctccgccgccctgtcttgtcatccccattctacagcccagcacggtgtagtatggcagccgctagccacaggtatctagggagccctggaaatgtggtcagttctaatggagctgtgctgtaagtgtgaaatacacgtgggattttgacggcagtgggagcaaaattctcccaatttttttttttttttttttttttcagacggaggttccgctcttgttacccagcctggagtccaatggcgcgatctaggctctctgcaacctccgcctcccgggttcaagcgattcccctgcctcagcctcccgagcagctgggactacaggcatgtgccaccacgcccggctaactttgtatttttagtacagatggggtttctccacgttgctcaggctggtctccaactcccgacctccggtgatctgcccagctgccgcctcccaaagtgttgcttgcgattacaggcttgagccaccgctcaccctggcttttttttttttttttccagacaaactctcgctctgtcgcccaggctggagtgcagtggcgcgatctcggctcactgcagcctctacctcccgggttccagcgattctcctgcctcagcctcctgggtagctgggattacaggcgcaggccaccacgcccggctaatttttgtatttttagggggtttcgccatgtcggccaggctggtctcgagctcctgacctcaggcgatccgcccgcctcggcctcccaaagcgctgggattacaggcgtaagccacgcgccgggctctttcattctgtctttattttctgagatagtcttcgtcggacgctcagctctgcgggacgtggatgaagctggaaggcctcattcccagcagaaccacacaggaagcgaaaaccaaacaccgcatgttctcgctccgaagtgggagttgaacagcgagaacacatgggacacggggaggggaacatcacacgccgggccctgacgggggcgtggggggcaaggggagagagagcattaggacaaatagccaacgcatgcggggcttcaaacctagacgactggtggataggtgcagcaaagcaccgtggcacacgtgtacctatgttccaaacctgcacgtcctgcacatgtaccccagaacttgggagggggtgggggaaaccaaaagagcgagggagaggcgggggggggggaagagagagagagagggaaagagagagagagacagagagaggagagagagagagagagagagagagagagagagacagagagagagacagagagacagagacagacacagagagacggagagacagagagagagagagagaaagagagagagagagagagagagagagagagagacaggagaaagaagaactccgggtgggtcccattcctttaaaaggtcgccacccactcgactgccaagctgagatcctaaggacctccccaaaggaggaggtcgtggccttcccaaagcgcagtagccacggtggaaacgaaagcgtgccgcataagcctaccgtctaccgcccgcacatcaggaacctcaaggtacttcagggaagcagttaagtcaagccggcgcgtcacaggcactcggcgtgcaagccgccccgcaggtgctaccgtctcttacctccctctacttttaggaaacacgttgtatccccggagggggtgcaccgttcctggaggtactgcaataccaggtcgatgcgtggagtggacggagcaagctcctattccatctccctgctccaaaaatccatttaatatattgtcctcggatagaggacgtatcagatattaaactgataagaacagatactacacttgatcttagccaaaaggccgagaagcgatgcgctcgccttcgcgcccgccgtcaccgtcccactctcatccacattcaagtcgcggtgagagccccagcctcgctccttgccccattccctctgtctcgtccacagcgctattgacgcccttacactctcgggctgatttcttattctccgcctttgaaaagggaaatcttacacccgtgcttcttccggcgttcccgggctttcatttcgaatttgcatgccccgccctttcacagagggcgtggcctccgccgttgactccgcccccggggccgcctctgcctgggggagccggggctccgctgggggcgacttccttgttcgtatcgagccagcgaaaagacagaaccggaagagaccgggggcgaaggcgacaggggtctgtggaagagacctgtcggcggagagcggtccacgttttcctggagaaagacgaggccccagggcaggagcgcgggctgcgctgggcctttacttcgccgcccgcgggcggggagaccggccccgtacccgaggggacgaggggacgaggggcccatgcccagtcagggaagccgaaggcctggaggggcttccgggagcaggggctggagttcctctgccaggcaggaggctggcaccagacacccggcagagggaggcggcgagggcccagcaaggattctccccagcccctgtgcctgcgtctcctgcggcttctgtgcgcggaccgtgtcctgtgctgtgtagggaacgctgcctctctgctcgggacgtggattcctttcccctcctcctcgcccggctacttctgacgcaggtcgtcaggactccgcttgggtgtcacccgtgcaggaagcctcccttagtcaagggccctcggcacccgccccatatgtgactagcagccctcctgtgtatttcatcgcgcccccgttgtttatatcagccattccactcaccacccttctgggcaaccctttatctcccgctctgaaatcccatcgctgagggctgggacccctcctcagtgcttatccctgtttccccgcgcgagtctggcgcctggcgtgtggaaggcgctcagtaaacgtttgtggagcgaagaaacgacgcaaaggtgatgagcacgacgcagttaggaggctattggcccggcgcgggggaaaagggggaaggtcgggctcggggtggcaggaccccagagggcaggggtggctgccggggtgctcttggggcaaggtgggcgtcaaggcccccagcaaggttgggataaagtttctctccgaggcacagactgccgcctgcgggctcagcatttacctctcccttcctctcctacgctacttcagcggagggctgagggctctactgcgcattacctgggaaaacctttattttattatatctgactattattaatcattagtttgtagcatcactctttgttctattaccataatgatctctgttctattatgattaccttgggggaaaccaggccacacagagttaggagctgaagggccacagtgagaggtgaccagaagacgagagtgtgagccctcattcacgcccagagaagggccgctggagggctccttggcctagcggtaatgccagtgcctgggaaggccctggttacttagcaggccttggtctagcggtggccccagtgcctgggaaggcacccgttacttagcagacccggaaagggaatctccctctctccaggagagacagagtgtgagccactgtgcccggctgggagcaagactggagcaagactccatctcaaaaaaataaaataaaataaataagtgaattaattaattaaaggccaggcatggtggttcacacttgtcaacattttgggagacttaggtgggaggattgcttgagtccaggagttccagaccagccagggcaacatagtgagaccctgtctgtattacaataataaaatcaaataaagtttttaatttttttttgagacaagagtctcactctatcactcaggtcagagtgcagtggcactatcttggctcactgcaacctccacctcactgattcaagtgattctcatgcctcagtctccccaggtagctggaattccaggcaagcgccaccatgcctagctactttttgtacttttagtagagaccaggtttcgccatgttggccaggctggtcttgaactcctgacctcaactgatccacccaccttggcctcccaaagtgctggattacaggtgtgagccaccatgcccggccaaaataacatttttaaaaactaaattaaatttatataacactgaccgggcatcatggctcatgcctgcaatcccagcactttgggaggctgagttgggtggatcacctgaggtcgggagtttgagaccagcctcaccaacatggagaaaccgtgtctctactaaaaatacaaaattatctgggcgtggtggcgcatgcctgtaataccagctactcgggaggctgaggcaggagaatcacttgaacccgggaggcagaggttgtggtgagccaagattgcaccattgcactccagcctgggcaacaagagcaaaactccatctcaaaaaaaaaaaaaaaaatttggttcctcagtcacactccaaggctcaatatagcatacaggctgggggttaccctattggacagaacatctttaaacctcccaggcctagtacccttgccttcccctagactattacaagagggaaattgagtcagctgatagtggtccccccaacacagacacagtctatctgagagaacgccaaatgaccttgctttcctcctacccccagcaaacagcattcaccaaatagtaggcagcttcctagggatctctctccattctccattcccttcctgctccagagaggaccctgaagaacccagcctatcccatgcacctgttctttctgctgcagctcctgctgctgctgggccatcagccatctccttcggtccaaagccatctgccggcgccgggcctcccagtggtaggcactacccatgatagtgggatggtatgaggccccaggtgggggtggggacaggcagagcccactgctcccaccacctctgtctcttcccactcagacccctctgcctataactggaaccacctcacaatgtggttactgccagggcaactgggcaggccccgcctgctttgttgagagagggaggcatttttcccaaggctcccagggaacatctgcaaagtacctttctctcctgggtcctgatcagatagaagaccttcccaccttagctttgagtctcaatgggccccatggacaattcagcagtaaagtcttttctctctggcttctttcccccattcttcctcagagggttccagcatcatcatctgacccttcctctgctcatctctccccacttaggtctccggaattacctttttctccttaatctctcctctctccatctcccccataaatgtctgtgctgagtcagaatgaaagaaaatacaaaatcctactaagcctcactgaggtctgagcccccagaacgcaaaggggcttcttagaaaacaccctagctctggagatttctaattctggactcaagcctagcgtctacctcttaattttattttcattttattttttattttttgagatggagtttcactcttgttgcccaggctggagtgcaatggcgcaatctcggctcactgcaacctccgcctcccaggttcaagagattctcctacctcagcctcccaagtagctaggattacaggcatgcaccaccatgcccggataatttttgtatttttagtagagacagggtttctccacgttggtcaggctgatctcaaactccagacctcaggtgatccgcccgcctcagcctcccaaagtgctgggattacaggtgtgagccaccacgcccagcctgggactgtgcatttaagatcaccccaagtggctgggcacagtggcctctgcctcctgggttcaagcaaacaaaaagaaagagcctaggcaacctagtgaaaccctgttcgggctgcggcctatctgtaccccagctattccagaggctgaggcaggagggtggatggatgctgggaggtggatgctgcagtgagcagtgattgcaccactgcactccagcctgggtgacagagccagaccccgtcccaaataaataaaaataaaggaaccagtttgtagaaagcaggagagggtcccattgaacttcaagccttcaagctacagctgtggctggacaggttggaccagcaggctggagcagtcgccatcttggcagggatcattgaccctgatctatcatcgggaggaagaagagctgatcttatgcagggagggcaggtggactatgtgtggactctggtgatctgtttgggtgccaggtgttactcccagggccacccataactgtgaatgtgcaggaaccctgacttaggttcctggggaatgagagtttggttcccggtacccagggaaaccaccagcatcggcagaggtgatagctggggaggagcggggatttggacgagagacacaggatgagtaccgggggcagccctgtgatcaacaactgctgcaagaggggccgtttgttcgactcactagtcttctgtggctctatgcggtactaaagagcagaagacagaagatacaaaaaccacaaaaattagccgggcgtggtgctgcgcgtcaataatcccagctactcgggaggctgagacgggagaatcgcttgaatccgggaggtggaagtttcagcgagctgagatcacgccattgcagtccaacctgagcgtccgagcgagactatctcagaaagtaaagacagaattaaagtgcccagcgcagtggctcacgcctgtaatcccagcgctttgggaggccgaggcgggcagatcacctgaagtcaggagttcgagaccagcctggccaacttggcgagacctccttaaaaatacaaaaattagctgggcgtggtggcgaacacctgtaatcccagctacccaaggaggctgaggcaggagaatcactggaacccgggaggcagaggctgcagtgagccgagatcgcgccactgcactccagcctgggtgacagagcaagactttgtctctgaaaaaaaaaaaaaaaaaaaagcatgggcgcggtggctcatgcctgtaatcccagcactttgggaggctgaggcgggcagatcatgaggtcaggagatcgagaccatcctggctaacacggtgaatccccgtctctactaaaagtacaaaaaaattagccagacgtggtggcaggtgcctgtcgtctcagctacttgggaggctgaggcagaagaatggcgcgaacccaggaggtggagcttgcagtgagccgagatgcgccactgcactccagcctcagcgacagagtgagactccgtctcaaaaaaaaaaaaaaaaaaaaaagcttgggccagtggctcacacctgtaatcccagcactttgggaggcggcaggcaggcggatcaccagaggttgggagttggagaccagcctgaccaacatggagaaaccccatctgtactaaaaagcctctgaggaagagtgggggaaagaagccagagagaaaagactttactgctgaattgtccatggggcccactgagactcaaagctaaggtgggaaggtcttctatctgatcaggacccaggagagaaaggtactttgcagatgttccctgggagccttgggaaaaatgcctccctccctcaacaaagcaggcggggcctgcccagttgccctggcagtaaccacattgtgaggtggttccagttataggcagaggggtctgagtgggaagagacagaggtggtgggagcagtgggctctgtctgtccccacccccacctggggcctcaccccacctcttcctataatcctggagaccctccctaatctgtctggacctcagtttccttgcctgaagaataagtgataacttgttaccttctttcacatagctggtataaggatcaaatagaataatggatgggaaataaaagataaagtataaaattgtttagctacaggttggtattattatcctacctgacccttccaaggactgtgtcctcagtaggtggagtgaacaggtgagaggattattctctgaagcccaggaaggcttttggggatagagactgtgcatttaattttttaatttttaaattttatttttattgtattttttgttttttgagacggagtttcactcttgttgcccaggctggagtgcaatggcatgatcttggctcaccgcaacctccgccaccctggttcaagcaagtcctgcaagtgatccgcccgcctcggcctcccaaagtgctgggattacaggcgcgagccaccacgcctggcctgggactgtgcatttaagatcacccaaagtggctgggcgaggtggtaatcccagcacactgggaggccaaggtgggcagatcatgaggtcaggagatcaagaccatcctggctaacatggtgaaaccccgtttctgctaaaaatacaaaaaattagccgagtgtggtggcacatgcctgtagtcccagctactcaggaggctgaagcagaagaattgcttgaacctgggaggcggaggttgcagtgagccgagatagcgccactgcactccagcctaggtgacagagcaagactccatctcagaaaaaaaaaaaaaaaaaaattagccgggcatggtggcggccgcctgtaatcccagctacttgggaggctgaggcaggagaatcgcttgaacccaggaggtggaggttgctgtgagccaagattgcaccactgtactccaacctgggtgacagagcaagactctgtcaaacaaacaaacaaacaaacaaataaagcctgtaggctgggacattggctcatgcgtgtaatcccagcacttttggaggtgaaggtgggaagattgttggagcccaggagttccagactagcctgggcaacatagacacgacatatcaactggcatgcccaccccaccatttcccaacccccatctctacaaaaaataaagcaagtttgttgttattcaagacccagaatcttctgttttggaagaagcaaagtgtggttagaagcacaagcagggccgggcatggtggctcacgcctgtaattccagcactttgggaggccaaggcaggtggatcacctaaggtcaagagatcaagaccagccaggccaacatagtgaaaccccgtctctactaaaccccccgtctctactaaaaaccccccgtctctactgaaaaaccccgtctctactgaaaccccccgtctctactaaaaatacaaaaaaattagctgggcgtgctggcgggcgcctgtaatcccagctactcaagaggctgaggcaggagaatcgcttgaatgtgggaggcagaggttgtggtcggccgagatggcgccactgcactccagcctgggcgaaagagcaaaactccatctcaaacacacacacacacacacacacacacacacacacacacacacacacacacacacagaagcacaagcagataagtcctgtgaaatatcagctgcaaggccgggcacggtagcctacgcctgtaatcccagcactttgggaggccaaggcgggcagatcacttgaggtcaggagttcgggaccagcctgtccaacatggtgaaaccccatctctactaataattaaaaaatgagcttggcatggtggccagcgcctgtaatcccagctactcaggaggctgaggcaggagaatcgcttgaacctgggaagcagatgttgcagtgagccgatattgcacgctgcactccagcctgggcaacagagcaagactctgtctcagaaaaaaacaaaacaaaacaaaaaaaaaaaacaagaaaaaatcagccggtcatggtggctcatgcctgtaatcctagcactttgggaggccgaggcaggtgaatcacttaaggtcaggagtttgggaccatcctggccaatatggtgaaatgctgtctactaaagttacaaaaaaaaattagctgggcatggtggcaggcgcttgtaatcccagctactctggaggctgaggcaggagaattgcttgaaaccaggaggcagaggttgcagtgagctgagatcatgccactgcactgtagcctgagcaatagagtgtgactcagtcttaaaaaaaaaaaaataaggccaggcgtagtggctcatgcctgtaatcccagcactttgggaggccgaggcgggcggatcacctgaggtcgggagttcgagaccagcctgatcaatatggagaaaccccatctctactaaaaatacaaaattagccgggcgtggtggcacatgcctgcaatcccagctactcgagaggctgaggcaggagaatcgcttgaacccaagaggtggaggttgcggtgagctgagattgcgccattgcactccagtctgggcaacaagagcaaaactctgtctcaaaaacaaaaaacaaaaaaaatcatctccattattaattgtacagatatgatcaattgctctacctctattatcagttcactcaccagcaaaatggggtaataatacctccatcctggaggtattggtatattaaaagaagtaatccggccaggtacattagctaacacctgtaatcccagcactttgagacgccgaggcaggcagatcacctgaggtcaggagttcaagaccagcctggccaatatggcgaaaccccgtctctactaaaaatacaaaaattagctgggtatggtggctgctgcctgtaatcccagctactcaggaggctgaggtaggagaattgcttgaatcccagaagtggaggttgcagtgagccgagggagatggcgccactacagtccagcttgggcgacagagcaagtctttgtctcaaagaaaaaaaaaaagagtaatccattgtcaagcacagggtttaataaacagagataaacagaggcttttattgtagtatttcatgacgtttaggatgtcatggattgtgagaggcaccattattttatgtacccctcagaaagaaaggaagaaaggagaaaaaaaaaaaagatgctgacatttaaacagctgtagtgctttttcctggcactggatgtaagatgcatcctggtttctgaggtctaaaaatatggaacaaaaatgtgccctctgaatgaatgaaatcatccaggcgtggtagctcacacctgtaatctcagcactttggaagaccaaagtggtagatcatttgaggcaggagttcaagaccagcctgggcaacatagggaaatccctgtcttgacaaaaaatttaaaaagtagtcaggtgtggtggcgcatacctgtagtctcagcttctcacttcccaggaggctgaggtagaaggattgcttgatccctggggacagagcaggatcctgtctcaaaaaaaaaaaaaaaaaagtgaaagcaggcaccatcatggagtgtggtcacttggaagcctgggccttgagccttggtgtcatccatcacctggaagaccctgaactttccctctctgggcctgaattttctcataaaccaaataagcacagaatggatgtttcctctggcctgctgggaggtcataacaaactgagaggcaagggctgctttgctgctctctgctgccccctgctactgcaaggagagaatcggatcttggggatgacccagcgctcctagaggtggtaaagtgcagcaagctgatccctgatatccaataaccttgtgattttttttttttttttgagacagcgtctcgctctgttgtccaggatggagagcagtaacgtgatcacagctcactgtaacctcaaatgcctggactcaagcgattctcccatctcagcctcctgagtaggtaggactacaggtgtgtgccactacacctggctaatatttttgttttttgtagagatggggtctcactggctgggcgcggtggctcacacctataatcccagctctttgggaggctgaggtgggcggatcacgaggtcaggagatcgagaccatcctggctaacatggtgaaaccccgtctctactaaaaatacaaaaaattagccaggtgtggtggtgggcgcctgtagtcccagctactcaggaggctgaggcaggagaatggcgtgaacccgggaggtggaggttgcagtgagccgagattgcgccactgcagtccagcctgggcgaccgagcaagactccgtctcaaaaaaaaaaaaaaaaagatggggtctcactgtgttgcccaggctggtctcaaactcctgggctcaagtgatcctcccacctgggcctcccaaagtgctgctgggattacaggcatgagccactccacatgggccctcttgtgatcttaatcattgtgccaggctcttcacattccatcctcagcattcaggtttccaccttcttcaatatgtatcacagaggtaagtcagtctcttggaaaatttggttagctcgaatttccttcctgaaactcagccttctcatctgttcaatggagattataaaccctgacccactttcctctaaggtggatgagaataaagatccactgatcataaagatataaaattgccagccaaaagtgggggtcccttttatactctgggaggaggaagcagaaggctgaggattttgggaagtcagtctaggcagcctcaatttcatcaagtataaaatgggataaataacatgttgcatttgggatttttttttttctgtcgcccagcctggagtgtgctggtccagtcacatcttgctgcagccttgacctcctgggctcaggtgatgctcttgcctcagcctcccaagttgctggcaccacaggcatgcactaccatgcccagctaacttttattttatcttattttatttattattactatttttttttttgagacagagtctggctctgtcgcccaggctggagtgcagtggcgcaatctcagctcactgcaagctccgcctcccgggttcacgccattctcctgcctcagcctccggagtagctgggactacaggcgcccgccactacgcccagttaattttttgtatttttagtagagacggggtttcaccatgttagccaggatggtctcgatctcctgacctcgtgatccgcccacctcggcctcccaaagtgctgggattacaggcgtgagccaccgcgcccggcctattattactatttttaatagagatgaggtctcactatgttgcccaggctggtcttgaactcctgagcttaagtggtcctcctgccttggcctcccaaagtgctaggattataggtgtgaaccactgtacctggccttatttttattattattatttgtagagatgaggtctcactatgttgcccaacctggtctcaaactcctaggctcaagtgatcctcctactttggcctcccaaagtgctgggattacaagggtaagccaccgcacctggctgcatttgggattgttgaaacaccgaaaagaaaatgtagatactcagtggcatacagtgggctcagaaaacaataccctaaaatgaaggcctcagcagcagcctcagaagtaaaaagtttttctctgactcccccagtcccattctcccctgaagctagccatagacacaaaaatccctcttccctgaggcaggtcatggaaaccagaagcccttttctccaaagccagcctgcaagtgtaaaaatattactctggttttccctctgtcctatctgtaaaaactggccacaaagaaattacctgacctactttgtttgactgtaggtcataagacccccattccacagagcatcctgcccgacacgcagaaggaaggaatacatgctcagagaagccaacaaggatctggacaggccaggcatggtggcccacgcctgtaattcccacactgtgggaggctgaggcaggaggatcgcttgaggccaggagttcaagatcctctatctggcaaaagtctaaaggagaaagtgacagacagcaacagctcgtcatggaaagtgtggctgaagacaaagagatgaaaaaggcttcaagaaatttccactttgagtctcaaaaggcaacatagcaagacactgttcctttcttttttttttttttttgagacggagtctcgctctgtcgcccaggctggagtgcagtggcgcgatcttggctcactgcaacctccgcctcctgggttcacgccattgtcctgcctcagcctcccaagtagctgggactacaggtgcccaccaccgcgcccggctaatttttttgtatgtttagtagagacagggtttcaccatgttagccaggatggtctcgatctcctgaccctgtaatccgcccaccttggcctcccaaagtgctgggattacaggcgtgagccactgcgcccggccagcaagacactgtttctacaaaaaattaaaaacttaaaaaacttagctgggtgtggtggcacacacctgtagtcctagctacttaggaggttgagatgggaggatctcttgagcccaggagtttgaggttaccgtgagctatgatcacgccactgcactccggtttgggcaatagagtgagactgtgttgggaaaaaaaataaaataaaacctggacagacaggagccttagggatttccccactcattgtattctccttacagcatgtcctcttgtccagtcatatttctacatggccttccatactttattgaccctaagcattaaaacggacaattttctctgtatctttgggtctttgctctgaagactctcatgtataccattaaaaacaaaattatatgccttttctcctgttaatctgcctcgtgccagtgatttttcactgaaccttcacagggcaaagacggaagtttccccttggctcccctaagtactcaaaaacaataccggggactgggaatgatggctgatgcctgtaaccccaggactttgggaggctgaggaaggatgattgcttgagctcaggagtttgagatcagcctgggcaacatagagagaacccatctctactaaaataaaaaaacaaaaaacagtacctgggaaaccaaattagcaagcaaaagatggcctgataaacacgaaaatgagcagagaggcagtaaaatagtgagccctgcagggtcatgatacttaccacaagccaggagatttactaatcactttctattgtaggaaatattaatatatttaatattcattcattcattcaaaaaatatatactgagtggctactatatgccaggcattgttcagggtgccagtcatataaaagtgaacaagcgacaaagattcctgctctggagcttacattctactatgctaaaatgcaataaacgtatcattgtataaaatgtggggtgacaggtgccaccgagtagaataaagccaggtaaaagagaacagagaccctgtgtggatgagggtagagaacgccaggactacagactagattttaagattcctgttttatacaggaaaaaaaataagcctcagaggagtgacttgcctaagctgttttcccttgcttttttttttttttttttttttttttgatacggcgtctcgctcagttgcccaggctggagtgcagtgggtggcatggtcttggctcattgcaatctccacctcccaggctcaagcaattctcctgcttcagcctcccgattagctgggattacaggcacccaccaaccatgcccgacttttttttttttttttttttttttgagacggagtcttgctctgtctcccaggctggagtgcaatggtgccattgtggctgactacagcctccgcctctgggttcaagcgattctcccacctcagccccccaagtagctgggattacaggtgcccaccaccacgcctggctaattttttgtatttttggtagagaggaggtttcaccatgttggccaggccagtctcgaactcctgacctcagatgatctgcccgcctaggcctcccaaagtactgggattacaggtgtgagccaccctgcctggctatttgttttttttttttttttttttttttttgagatagggtctcagtcggtcccccaggttggagtggagtgcagtggcctgatcacagctcattgccactttggcctcctggggctcaagctgttttcccagggctcaagtggtcctcccagggctcaagtagtcccccaagctcagtctccccagtcactgggactacaagcctgctccaccacgcccggtagattttctggttttttttttttttttttttttgtagagatggggctctcactttgttgtcaaggctggtctcgaactcctgggctcaagtgatcctcccatttcggcctcccaaagtgttgggattacaggcatgagccacagtgccagggccgaggctcttctcaactgctgcagcagacagcttggttcttgcctctctgcagacagaagacttgtgtctcaggctcagtgctttgtctcacagagtgctggacacacaagaacaaattatctttctctaggtatccatttttggctctaggctctctgcttcacaggtggatggagtgatggggaagatgctgtggccagtgcacctaggttcaaatcctacctccctgtggtcttgggcaagctgcttaacctctctgcctcagcttctgcatctgtatgtaacttttgcaagtttgtaatgaggagagcacttaacacagagcctaagccaaacagtaaatgcttcctattttattgtctcagtcatttcacagtcatgaccccttctggggaagcttgtgggaaactctgactcacattgcagactaccgagccacggtcccttcctcggctccgtttctgctccctccaccccacgaggtaggcattggtgtttctgctttccagctggggaaacagagtccggaggttaagtggtttgcccccagtgccccgccgacagggcaaggcgcgcggacggggctgtgactcccagggcggcagccccctcggcgcggtctcgcgacccgacttctctctgtggccccgggaagggggtggggggcggcggggcctcgtcggctccgccttcgcttgggacccagccaggccgcgggacgctccagtctttacagtgatgacctgatggctttcctcaaaagagctcggaccactctcctccaactcccttccacagaccgctagtgacgcccacgcgcatttccccctgaccactgtcttgacccccggatggtccagaccgggagccccagcccagcttcggccggccgctgcgagcagagctggaccgcagcggggactcagatcgccgtagccacgcctacccacgcgggaaagggcgagacatgcaaattagaaatggcgcttcagccacggggcaaaaacagagctgagaattcacttgaaaacgtagccaactataaaccatgcccaaaggcttgctgttttcaacaggcctattgagaaacgaagttgtcaattgcccctatcgttgctcaccgtgggtgtaatatggtgatatgagggtggtaatggcgaaggcaaagatgctggattcgacaaatttttccagatctctgtttgtggtgaggtgtaattatgtgtgtttttcctagcttagtgtgtgcgttctttctttttgtttctgagaatgctgtgttgagggggtttttggagaaaacggtggggttgggaggttgtagtacttcaaacaaaggtgaacgattttttaggtgagtgagcgttgtgttttaaaggttatactttgttatattcacgttcttattgcgttatatcatgcttcagaattggtcgtcaatatccttgtctaggtgagagtatgtgtgaccagccccctccccgcctttttttttttttttttttgtcttatagagtgtcacttttgtcatccaggctggagtgcagtggcgggatgagagttcactatgatctcgacttcctggactcagatggttctcccacttcagcttccggatctaatatttcaataatttcaagaacactgcattcattcctctccacatgagcaattgccaaaagtaggctttacatttttgctcgttttcttttgggtctgtggctagtctccacttccttttttttttttttttttttttttttttttttaagatagtctcactctgtcccccacaacccccaaccccggctggagtgcagtggccagatctgggcttactgcaacctctgcctcccaagttcaggtgattcttgtgcctcagcctcctgagtagctgggattacaggcacgtgcccaccatgactggctaattttttgcatttttagtagagacggggttttgccatgttggccaggttggtctcgaacgcctggcctcaaagtgatccacccgtttgggcctcccaaagtgctgggattacaggcctgagttactgcacccggcctgtccccgaaattcgattgcagccggcgataaagcttttttttaccccgcttctcggcaaagcgttgtgtttttattttagcagactcacctggcactaaggactgctctggtggtcttcggaggctcctgggatcgactgcttggacagaggtgacatcacccaattagtgagagccaagacctaaggctgcagctgccttccaggtatctgccactcactgtagaacgatcccacagttctgcatttctgccctatgcccgccagtcacaagaagctccggtctcttatcccatgtctgattcctgaaaccttgctaattttcctaccatcctccctattcccagcctcctttcttcttcttcttcttcttcttcttttttttttttttttgaggctgagtttcactcttgttgcctaggctggagtgcaatggtgcgatctcggctcactgcaacctccacctcctgggttcaagcgattctcctgcctcagcctccagagtagctgggattacaggcatgtgccaccacgcccggctaaattttttttgtatttttagtagagatggggtttctccatgatggtcaggctggtctcaaactgccaaactcaggtgatccacccgcactggcctcccaaagtgctgggattacaggtgtgagccactgtgcccggcccccctttcttcgtttgctctatcctcccgctgaagacattgctttcctctttctgtttgctctccccacctctcactccattgtgccttgcacctgtgctgcccactacctctccttgttgctgttgtctctcctggctgctggtcactccatgccaacacttactttattccttgaaggtttttagctcctggagcactgactttctccagcataactcctgtcatcaatcgacaccctggttccccaattccttgacctcagctttgactaccccagccactcacttccctggtctaaccctaggtcatgtcattgtcgattgccataaccccatccacttcgagggtcacactctccaatcacctctaccatccctccctctgctaccctttggtacctgtcaccccactccccaccccctcaacccgcatccccaaagtccttgggcccacctccaactaatctaactgcaccaactctaacaaactgcacctgtgtcactgagtgtaactggtggaagctgactgggctcaccttaaccctgggcaagctgggggaaaatagacatcccacatttgctacctggggcccaataagtctgcattagtctgtgctcgtgctgctaataaaaacataccggagactgggtaatttataaagaaaaagaggtttaatggactcacagttccacgtggctggggaagcctcacaatcatggtggaaggtgaaaggcatgtcttacatggtggaaggtgagagagaacttgtgcaagggaactcccctttataaaaccatcagatcttgtgagacttattcactatcatgagaacaatatggaaaagtcctggccccatgattcaattacctcccactgggtccctcccatgacacgtgggaattatgggagctacaattcaagatgagacttgggtggggacacagccaaaccatatcattttgctgtagcccctcccaaatctcatgtcctcacatttcaaaacctatcatgccttcccaacagtctcccaaagtcttatttcagcattaactcaaaagtctacagtccaaagtctcatctgagacaaggcaagtcccttccgcctaccagcctgtacaatcaaaagcaagttagggtcgggcatggtggctcatgcctgtgatcccagcactttgggaggccaaggcaggcagatcatctgagttcgggagtttgagaccagtctggccaacatagtgaaaccccatctctactaaaaatacaaaaaaattagccgggcgtggtggcacatgcctgtaatcccagctactcgagaggccgaagcaggagaatcgcttgaacccaggaggcagaggttgcagtgagccaagatcatggcactgcactccagcctgggtgacagagtgagactctgtctcaaaaagaaaaaaaaaaaagcaagtttgttaattcctagatacaatgagggtacaggcattgagtaaatacagctgttcaaaatgggagaaattggccaaaacaaaggggttacagatctcctatgcaagtctgaagtccagtggagcagtcaaatctttttttttttttttttttttttgagatggagtcttgctctgtcacccaggctggagtgcagtggcatgatcttggctcactgcaacctccacctcccgggttcaagcaattcttctgcctcagcctcctgagtagctgggattacaggcacatgccacaatgcctggctaattttttttgtatttttagtagagacggagtttcaccatgttggccaggctggtcttgaactcctgaactcaagcgatcctcccaccttggcctcccaaagtgctggaattacaggagtgagccgacatgcctggcagcagtcaaatcttaaagccccaaaatgatttcctttgactccatgtctcatgtccaggtcacactgatgcaagaggtgggctcccatggccttggcagctctgcccctgtggctttgcagggtatagccccccctcccagctgctttcacaggcaggccttgagtgtctgtggcttttccaggagcaaggtgcaagctgtcagtggagctaccattctggggtctggaggacagtgactcttttcttgcagctccactaggcactgccccagttgggagtctgtgtgagggcttgcaccccacaatttccctttgcactgccctagcagtggttctccatgagggctccacccctgcagcccacctctacctggacatccaggcatttctacacatcctctgaaatcttggcagaggttcccaagcctcaattcttgacttctgtgcactcgcaggcacaacaccacatgaaagctgccaaggcctagggtttgcaccctctgaagccacagcctgagctgcaccttggccccttttagctgtggctggagcagctgggatacaaggcaccaagtccccaggctgcacagagcaggggggccctgggcacagcccatgaaaccattttttcctactaggcctccaagcctgtgatgggagggtctgccacatgaaggtctctgacataccctggagacatttccccccactgtcttcatgattaacatttggcttctcgttacttatgcaaatttctgaggccagcttgaatttctcctctgaatttttttttttttttttttttttttgagatggagtcttgatctgttgccaggctggagtgcactggcacaatctcggctcattgcaacctccgcctcccgggttcaagcgattctcctgcctcagcctcccgagtagctgggactacaggtgtgtgccaccatgcccagctaatttttgtattttcagtagagaccgagtttcaccaggttggccaggatggtctcaatctcttgacttcatgatctgcccacttcagcctctcaaagtactaggattacgggcatcaggcactgcacccggcctgggtttttcttttctaccgcattgtcaggctgcaaattttttgaaattgtatgctcattttaacttttttttttttttttaatggagtcttgctctgtcacccaggccagagtgcagtggcgtgatcttggctcattgcaacctctgcctcctgggtttaagcagttctctgcctcagcctcccaagtagtggggattacaggagcccaccacaacaccctgctaatttttgtatttttagtagagatggggtttcactatattggccaggctggtcttgaactactgaccttgtgatctgctcaactcagcctcccaaagggctgggactacaggcatgagccactgctcctggtctgtttcacttttacaactgaatgctggccagatgtggtggctcatccctgtaatcccagcactttgggaggcctaggcaggcagatcacgaggtcaagagtttgagacaagcctgccaatatggtgaaaccccatctctactaaaaatacaaaaattagcctggcgtggtggtgggcgcctgtggtcccagctactcgggaggctgaggcaggagaattgtttgaacccaggatgtgaaggttgcagtgagccgagatcacgccactgcagtcagtccagcctgggcgacagagcgagactccgtctcaaaaaaaaaaaaaaaataagaacagaatgctactgggcacaatggctcatgcctgtaatcccaccactttgggagactgaggtgggcagatcaattcacatcaggagtttgagaccagcctggcaaacatggtgaaaccctatctctaataaaaatacaaaaattggctgggtgtggtggcaggcacatgtaatcacagctactcaggagactgaggcacgagaatcacttgattctctgcgggcagaggttgcagtgagccgagatcttgccactgcatgccagcctgggcaacagagactatctcaaaaaaacaaaaatagcaaaaacaacaacaaatcctggatgcttttaacagcaccaaagtcacctcttgaatgtttgctgcttagaaattctgtaaccgccaggcgtggtggctcacgcctataatcccaacatgttgggaggccgaggcaggaggatcacctgaggtcaggagtttgagaccagccggatcaacatggagaaacctggtctctactaaaaatacaaaattagccaagtgtggtggcacatgcctgtaatcccagctgctcaggaggctgaggcaggagaatcgcctgaacccaggaggcggaggttggggtgagctgagatcctgccattgcactcccctgggcaacaggagcgaaactccatcacgaaaaaaaaaaagaaagaaagaaaaaaagaaattctgtaatcgccggcacggtggctcacacctgtaatcccaacactttgggaggacgaggcaggcagatcacctgagttagagaccagcctgcccaacattgcgaaaccccacctctactaaaaatacaaaattagctgggcgtggtggcgcatccctgtaatcccagctgctccagaggctgaggcaggagaatcgcttgtacctgggaggtggaggttgcagtgagccgagatcgcgccattcgactccaacacgcgaatcaagagcaaaactccgacacaaaaaaaaaaaaagaaaagaaaagaaaaagacaagaaaaagagagagagatgttggaaagaaaagcctcacagaaggcagggcacggtgactcaagcctgtaatccgagaactttgggaggctgaggggggcggatgacgaggtcaggagatggagaccatcctggctaacaggatgagaccgccgtctctactaaaaataggaaaaatttgctgggcgtggtggcctacgcctgtaatcccagctacccaggaggctgaggcaggagaatcgctggaacccgggaggtagaggctgcagtgagccgagatcgcgccactgcactccagcctgggcgacagagcaagagtttgtctgtaaaaaaaaaaaaaaaaaaaaaaaaaaaaaaagccagggtgagcggtggcttaagcctgtaatcgcaagcaacactttgggaggcggcggctcggcagatcaccggaggtcgggagttggagaccagcctgaccaacgtggagaaaccccatctgtactaaaaatacaaacttagccgggcgtggtggcacatgcctgtagtcccagctgctcgggaggctgaggcaggggaattgcttgaacccgggaggcggaggttgcagagagcctagatcgcgccattggactccaggctgggtaacaagagcggaacctccgtctgaaaaaaaaaaaaaaaaaaaaaaaaaattgggagaattttgctcccactgccgtcaaaatcccatgtgtatttcacacttaacagcgcagctccattagaactgaccacatttccagggctccctagatacctgtggctagcggctgccatactacaccgtgctgggctgtagaatggggatgacaagacagggcggcggagattgtgttggcgtgaagcgagggaaacactcggccgcaggacaaaactaaaacagcaagggggcaccgaaagactcagtagtccacgtgaatatcctgattatgttgtagctgagataatgtagggtccacccctaccgggtctgtgggttttctcttcgcgtgtgtgcggagacgagagatcgaagagataaagacagaagacaaagagataggaagaaagacagctgggcccgggggaccactgccaccaaagcgcggagacagacaggtagtggccccgagtgcctggaggcgctgctatttattgtagtcaaggcaagggggcagggtaaggagtgccagtcatctccaatgatcgataggtcacgcgagtcacgtgtccactggacagggggcctttccctttgtggtagccgaggtggagagggaggacagcaaacgtcagcgtttcttctatgcacttatcagaaagatcgaagactgtggtactcctactagttctgctactgctgtcttctaagaacttaaaaggaggagccaggtgtacaggctgaacatgaaagtgaacaaggagcgtgaccactgaagcacagcatcacagggagacagacgttggagcctccggatgactgcgggccggcctggctaatgtcagacctcccacaagaggtggtggagcggagcgttctctgtctcccctggagagagggagattccctttccgggtctgctaagtaacgggtgccttcccaggcactggggccaccgctagaccaaggcctgctaagtaaccagggccttcccaggcactggcattaccgctagaccaaagtgttctaaataacaggtgccttccgaggaagaggcactaccacaagaccatggagccctcaagcagccgttatccgggcatgacagagggctcatactcttgtcttctggttacctctcacattgtcccctctacttcttactctgtatggcctgttttttcctcggttataataacaaagattaatactaaaaactaataattgataatatccatatgtaatcatctctgtatcctatgtctgatataactttcttttatcctattttctttattatattggaacagcttctgcgttcagtgtcttgccttggcatctggatggctttctgtagggtgcagccctacagggcctgtgggtttttctgtatgtgtgcggagacaatagatcatggaaataaaaacaccggacaaagagatagtagaaaacacagctgggcccacgggaacactaccacgaaaactcggagaccggtagtggccctgaaggcctagctacgctgttatttattgtatacaaggcaagggggcatggtaaggagtgcgagtcatggccaatgataggtaagggcacgcgagtcatgcatccactgtacagggggcccttccctgtttggtagccgaggcagagacagagaggggagagcttacgtcattatttcttctttgcatttcttgggaagatcaaagactctaatactttcactaattgtgctgctgctatccagaaggcggggccatgtgcacagagcggaaaatgaaagtggaccaggaccactgaagcacagcatcacagggagacgtttaggtctccggatgcctgcaggcatggttgcaggcgggtctgactaatgtcaggccttccacaagaggtggtggagcagagtcttctcttactccgcagggaaaggcagagtccctttcctggtctgctaagtaacgggtgccttcccagacactggcgttaccgcttcaccaaggagccctcctagtggccctgcccgggcatgacagagggctcacactcttgtcttctggtcacttctcaccatgttccttcagctcctatctctgtatggcctagattttcctaggttataattgtagaacagagattattatattggaataaagagtaatgctacaaactgattaataatattcacatataatcacatataatcctatctatattctatttctagtatgactattcttattctaaatattttctttattatactggaacagctcgtgctctccgtctcttgccttgggacgtcggtggcttaccacccacatctccccactttttattgactaggatcatcattgccatcattgcttgtcgttgacttgggacttgtcctcggcctccttggagacatctgcagactaaaagtagacaacataaacataccagtattaataatgccaatgacaacgatgatcctccgaggggtttgatccatttaaagggattaagatcagataatcctttagttattccttcaaaactgcccaaggcaggagcagtagttaaatgagcctgtgaggcctcaaaaacgtgttctttaggttttgaaatatctaaggttaagttatcatcccaggcttttaaatgtcttgagacttcttccccactatgttgatctttattataaacataaggttttatgcaataatcagaagtattccaatcgcactgtaattgcatatggtgttccagattcataactctatctcccagtcagattacactctggtggagataattaatttgattagccaatttttgatcaacttgagcatgagaatttcagagtttggtggagttttttttgccatgcttccacatattgagcggtttgaacagagttgtggatagcaactccaacggttgtcgctgttgcagtaatggcaattagtcctgcaatgactgcaataagagtaaaaatgaatctcttggttcttttgaggatacccttaagaagttcactgactatgtgtatagagggggaagacttccatggatgatgtaaagaaattatatccatacccccttcctagcccttatcaaaagaatacttgttctgggattaaaagtagcatcgatacacgtgaacagcttacaatcattacattctatagtttgtgtattgggagtaataattataattccaactagcagcatgtaaggggatttgacacagctcctgatatgtatcacctgtcctgacatcaaggtgatcttgaatatgagtgtcttggtattagtaggagagatttgataggtagcgttccatatccttattcctgtcatggctgcagctaatttccctaattcaggatgttcaggggtaacaatttgatgaatcatttttggtctaggaggaacgattcctgtgttcctccatttgaatggataaggggcacccattccctcaacctgtagaattgccatcagtcctttacataatctaacaaataattaaactccaagcatttggcattttagccagagcaatttctccaataataccctcttggggcccagtcaataacagcacccatagctagattttggaacactacggcctttggagcattacaatcattccataaaattgaatttagtagaaaatgtccctttgtaggttcctttgagcagtctggcaatccttttgttttattgcttttagtagtgacaggaactctccattcctcatgtggattaagtttaacattcatgagttgaaaagaattgctcctgcacttgataagaatcattactagaggactgtatggtccacatcgaattctgataagaataagctaagcagccaggcaacattccaatacacagtggtggatatttgtagccaattgacaaattaaagtgcataccttttacttctggttgagctggaaacctgtcatcattggggactggcatgaagacactattattagtgtaaacttccactgaggagtccatccaggagacagaccgaattaaagggggaaaaggaatgtatgcccagtaggtataattttgagttgccccaacccctggtatactcaccactgcactgaccaccataaaggcagccagaattatattacccgtcacttttggaattcctttttcttgtagttatttctctgtttgatgggataagacctttatctggccccatgttggtagagtagaatgactggtgttggaggtcacacggtgagattttgttgtaatgtcgaggtcatggaatttatgtgtcaggtggcaaaacttgctctttgatttctgaggcttctttgccttttgtttctgagagttcttcatccttggagttaaaatgcaatctcagttgatgggagggaacccacacgggttgttgtccttctcctggggaaacacaagcgaaacccctaccccatgttaccacagtgcctaattcctatttgtcagtttttgtatccttccaccatacccactttcctttttgtggatcaaatctgtttccagtgaaatgttgttctgctgctgtaaaaggttgatttcttgctaggtttaagaaattgagtgtaaaaagaacaaaatttaactgagtatgggggtaggagcatccttcttctctttagtgtcctgttttcaaagttggtctttcagcattttattaactcgttctaccaatgcctgtccttgacagttatagggaatgccagttgtgtgagtaattccccatgtctgagtgaactttttaaaatcattgctaatgtaaccagaaaattgtcagtttttagtttctcaggacatcccataaccaagaaacatgaaaccatgtgctgtttaacatgagccgtactttcccccgtttgacatgtggcccagataaaatgagaaaaagtgtcaatagttacatgcataaaagagagtttgctgaaagctggataatgagtcacgtccatttgccagagaatattttgtgaaagtcctctagggttaactcctgaagaaagtggatgtaaaattaacacttggcaagtaggacagtgacatacaatggttttagcttgcttccatgtgaagcagaacttttttccgagtcccgcagcattgacttgagttacagcgtgaaaattttctacgtccataaaaatgggagcaactaatgtatcagcgctggcatttgctgctgagagaggtcggggaagggcatgtgagcccgaacgtgagtaatgtagaagggagaagaccttgctctgagtagggactgaaacttttggaaaagaaaaagtggttatcatcaggcagaaatgtgtttaaggcagtttcaatgttgcaagcaacacctgctgcgtacaccaaatcagaaactatgttaactggttcagggaaatattcaagaacagccatgacagcagtcagctcagcttgttgtgctgaagtagctcctgagttaaggacacattcttttggccctgcatatgctccttggtcattacaggaagcatcagtaaaaacagtgacagcttcagctaatggagtatccatagtaatgttaggtaagatccaagaagtaagtttaaggaactgaaatagttttacattaggataatgattgtcaattatacccaggaaacctgccaaatgtacttggcaagcaatgcaggttgcaaaagcctgttggacttgtaatcaggtgagggaaacaatgattttttggggctctgtacccaaaagatgaagaaggtgagaaagagcttgaccaattaggatagaaatttgatctagataaacggtaagcgtccgtaaagagctgtgtggaagaaagcactattcaattaaattatgtccctggataatgagtcctgttggtgaatgtttagtaggaaagattagtatttcaaaaggtaaatatggattcgccctggttacctgagactgttgaatgcgtttttctataagttgtaattcagaatctgcctcaggggtcaaagaccttttgttgcataaatcaggattgccccataatgttgcaaacagattagacatagcatatgtaagaatgcctaaggaggggcaaatccaattaatatctccaagcattttttggaaatcatttagcgtttttagagagtctcatctgagttgaaccttttggggcttaataaccttgtcttctagctgcattcctaaatattgataaggagaagaagtttggattttttctggagcgacagccaaaccagctgttgcaactgcttgtcgtactgcagagaaacaagatattaatacagaacgtgaaggcactgcacaaagaatatcatccatgtaatgaatgataaaaaattggggaaattgatctcttactggctttaatatgctccccacgtaatattgacaaatggtaggctattaagcattccctgaggtaggactttccaatggtaacgtgctgtgggagcgatgttgttaagggttggaactgtgaaagcaaatttttcaaagtcctgaggggccagaggaatgttgaagaagcagtctttaagatcaatgatgataagaggccaatacttgggaatcatagcggggaaaggcaagctgggttgtaatgtccccataggctgaaggacagcacttactgccctaagatcagtaagcattctccacttaccggatttcttttggataacaaagacaggtgaattccagatagaaaaagattgctcgatgtgtcccaattttaactgttcaaggatcaaaatatggagtgcctccagcttatttttagggagcggccactgatttacccaaaccggtttctgagttttccaagtcaaggggatgggatttggaggcttgatagtgaccacttctaaaaagaataaccaagtcccgtaaaatctgatttatgggtaggtataataggctcggtgatgccttgtgctgatttccctaagcccataacttgaacaaatcccatttttgtcataatgtctttactttgctggctgtaattgccttgtggaaaagaaatctgtgcccctcgttgttgtaaaagttctcttccccacaggttaacaggaatgggtgtaatgagggggcaaatagtaccaatctgttcttctgggcccgtacagtgtaaaattgtagaactttcatagacttctgaagcctgaccaacaccaactaatgctgtggacgcgtgttcctttggccagtgtcggggccattgatgtaaagcgataatggagacatcagcgcccgtatcaatcattccctcaaacttccttccttgaatatgcacagagcacacaggacgagtgtcagaaatcttgctggctcaataagctgctttgtcctgatagtctgtgctaccaaaacctccagttctggtacaagaactggatcctaaaggaacgtaagggagtataagaagctgagcaatgcggtctccagctgccgtatatcaagggactgcagagctaatgacaatatgaatttcacctgaatagtcagaatcaattacaccagtatgtacttgaacaccttttaaatttaggcttgagagatcaaatagcaaaccgacactgccagtcggcaaggggccaaaaacacctgtgggaacagcaataggtggctctccaggtaacagagaaatatctctggtacaacagagatctactgatgctgagcctgtggtggcaggggacaagcattgtactgagattcgtgttggggcagagccattagatcctgtggcacaaattgctgaagtgggaattgggatgtaggttgaatggattgggctggcaaggcgctcatcttgctggacgccaggggctcggagttgaggaatgccccattgtttggaggggcctagggctggcccctcttcccgtttacctggaagtgaccgtaagggattgccatcaatatcaaattttgaatggcattgagccacccagtgatttcctttttggcatcgtgggcatatagtagaaagtggggcttgttgttgaaaaaattttggttgttggtgttgaaaagaacagcggtctgtatgccaaggacaatttcttttagaatgtcccgattggctgcataggaagcatttgccagggaattgtccaggcattcgaatagagaccatggcttgtgccatgaccattgctgtacgcagagttcccctcacgccttcacagactttaatgtatgaggtgagtacatcaccccctggtggaattttgcctttaatggggcaaatagccacctgacagtctggatttacttgttcataagccataagttctataacaagtcattggccctggctatcagggatagctttttctgctgcgtcttgaagatggacaataaagtctggatacggttcatgttgtccccgtctgacggctgtaaaacatgggcatagtttgtcatcatcttgaatcttgtcccaagcatctaagcagcatttccacagttgttcaataacctcatcatttagtatagtttggtttcgaattgcagcccactggcccattcccagtaattggtcggctgtaacattaacaggaggattagagcccaaagacgaatgcattcctggatagcatcaacccaccaagtcctgaattgtaaatattgagatttagataagactgactgctaaaatctcccagtcatagggcaccaagtgtttattttctgctagggcttttaatttggaatggacaaaaggggagttggtgccatactgcttcacagattctttgaaatctttgaggaatttaaaagaaaaacttggccaggtgcggtggctcactcctgtaatcccagcactttgggaggcccaggcaggtggatcacaaggtcaggagatcgagaccatcctggctaacagggtgaaagtctgtctctactaaaaatacaaaaaaaaaaaaaaaattagccgggcatgcctgggagacagagcgagactccatctcaaaaaaaaaaaaaaaaaaaaaagaaaaaaaaactttcctaagtagcgggacatagctgaacctggcctggatgtatagggtcaggttgaactactgcctgaactactggaacatcaggaactggctgtgtctcagcggcaggcagttgtggagcctgattattttcctgagcagcctgattgtcaggctgttgatcttgacgggttgcgggatcagctgcctgctgagaaggatcagcaggctgtggctgattttgtgccactgggacggcgggtattggaggttgtaaaattacaggaaattgccaggcttcgggatccccatattctcttgtctgagctatagccctcataaaaggagtgtcattttcagggatgtatatagctcattgcttatgagcggcaatggtggtattggccaccacagtagcaactggaccagaagcaggaaaaagtttggaattttgaatggaggaagagttgagaacctgtaggccaggatgagacgagattacctgctgggcaggtctttcatgggcctgaggctgccgcagtaactgtggaccaggcttcaagggagcctgaggtttcaagggagcctgatttgtcagaaaagacccaggcttcaaggaagtgtgatttgccgaaagagacccaggcttcgagggagactgatttgccaaaagatacccaggcttcaaaggagcctgatttctgaaagagacccaggcttcaagggagcctgatttaccaagagaggtccaggcttcaagggagactgacttgtcaaaagagaacgagaagagagaggtggaaaaataggttgaatatggatagggttgagggcctcataactgggctgaactggtagaaagttgagagccccacagcggggctgaacagagatagggttgagggcctcattaccaggctgaataggcaagaagttgagagctctacagcagggctgaacagggatagggttcagggcctcattaccaggcagggaattgagagcctcttcaccgggctgtgtagaaattggagcctctgtaccaggctgcatgaaaacatagtttagagcctctttttcaggctgcatcatctcattttctatctgcatagctggagagttgagagtttgaggaaaggtaggagggtacagctgtgatggctgttgataatatctttcagctggattttgctggttgggggaaataaattcattcagatcagttaaaagttcatcataaagcgataaccggggcatggtaggctctggcgtaggtggtggcaccaaaggaatatcagagtggaggtccatctgtagaactatggcctcaatctgtgcagtatcctcaggtgaaaaagaactaagcacttcctcagcctcctcagaggaaagagggatcagtctccatgttgtcctcctgagtctgtaaagagtctaggacagagcgaaccgaagcccagattgaccaaattgggggtggaataatatgcccgcctttatgagcaattttgaatgtctgccaatctcatcccaatccttaagttctaaagttccctcagtaggaaaccaagggcaaagaagatctacaacatcaaacagttcaattaacttatcagtagatacttttaaccactccttctttaaggagagtttttataaaatttaaataagctgagtacttagtacaggcctgtcccttggtgtccccgggatactctgagtgcccaagcttaccaccaagcttattgacctcaatcctcaggaatctgtcattgaaatcctctgctgtgtttcacgctcaaagtgcaacttcacacagcgagagagaaattctcgttgggcgccagatgtagggtccaaccctacagggcctttggggttttctcttgtgtgtggagatgatagatcatagaaataaagacacaaaacaaagagatagaataaaagacagctgggcccgggtgaacactaccaccaagacgcggagaccggtagtggccccgaatgcctggctgtgctgttacttattgtatacaaggcaagggggcagggtaaggagtgcaggtcatctccaatgataggtaaggtcacgtgagtcacgtgaccactggacaggggcccttccctatttggtagctgaggtggagacagagaggggacagcttacgtcattatttcttctatgcatttctcggaaagatcaaagactttaatactttcactaattctgctaccgctgtctagaaggccaggctaggtgcacagagtggaacatgaaaatgaacaaggagcgtgaccactgaagcacagcatcacagggagacgtttaggcctccagatggctgtgggcatggctgcgggtgggcctgacaaagatcttccacaagaggtggtggagcagagtcttctctaactctctccctttcctggtctgctaagtaacgggtgccttcccaggcactggcgctaccactagaccagtctgctaagtaacgggtgcctccccaggcactggcgttaccgctagaccaaggagccctctagtggccctgtccgggcatgacagagggctcacactcttgtcttccggtcacttctcaccgtgtcctttcagctcctatctctgtatggcctaattttttctaggttataattgtaaaacagatattattataatattggaataaagagtaaatctacaaactaatgattaatattcatatatgatcatatctgtattctatttctagtataactattcttattctatatattttattatactggaacatcttgtgccttcggtctcttgcctcagcacctgggtagcttgccgcctgtagggtccagccctacagggtttagtgggtgttctacccatgtatggagatgagagattataagagataaagacacaagacaaagagataaagagaaaacagctgggcccaggggaccattaccaccaagacgcagagaccagtaggggcccggaatggctgggctcgctgatatttattacatacaagacaaagggggaagagtaaggagggtgagacgtccaagtgattgataagctcaagcaagtcacatgatcatgggacagggggcccttcccttttaggtagctgaagcagagaggaaaggcagcatacatcagtgttttcttctaggcacttataagaaagttcaaagattttaagactttcactatttcttctaccactatctactatgaacttcaaagaggaaccaggagtacaggaggaacatgaaagtggacaaggagcatgaccactgaagcacagcaccacggggaggggtttaggcctccagatgactgcagggcaggcctggataatataaagcctcccacaaggaggtggtgaagcagagtgtttcctgactcctccaagaacagggagactccctttcttggtctgctaagtaacgggtgccttcccaggcactggcattactgcttggccaaggagccctcaaccggcccttatgtgggcatgacagagggctcacctcttgctttctaggtcacttctcacaatgtcccttcagtacatgatcctacacccatcaattattcctaggttatattagtaatgcaacaaagactaatattaaaagctaatgattaataatgtttatacattattgattgataattgtccatgatcatctctatatctaatttgtattgtaagtattctttattctaactattttctttattatactgctacagtttgtgccttcagtctcctgtcttggcacctgggtaatccttcgtccacagctgcccaaatctcccctctttttattgactaggatcatcattgccatcattgcttgttgactttgggcttttcatcggactccctgaagacatctgcatactaaaagcagacaacataaacacaccaatatcagtaatgctagtgacaatagtgaacctctaaggggtttgatccgtttaaaaagattaagatcggataatactttggtgatttcctcaaaaatatgagagccaggaacggtagttaagtgagcctgtgaggcccccaaaatttgctctttcagttttgaaatatcttaagttagattatcatcccaggctttgaatgtctcatgactttttcccagctatgctgatcttttttataagcataaggcattatgcaataatcagaattattccaatcacattgtaattgcatacggtgttgcaaattcataactctatctcccagccatatcacactctggtggagatcattaatttgattagccaaatttgatcaacttgagcctgagaattccagagtctggtggagtttttgtttgtttgtttgtttttttgccacacttccacatattgagtggtctgaacagagttgtggatagcaactccagctgccattgctgtggcagtgacagcaattaatcctgcaatgactgcaataagagtaaagatgaatctcttcgttctcttaaggattcctttaaggatttcattgactatatgaatagagggagaagactcccaagggtggtgtaaagaaacggtatccttaccccctccctagcccttaccaggagaatacttgttatgggatgaaatgtaacacgaatacatgtaaacaatttgcaatcatcaaattctatggtttggctgttggggggtgataattatatttccgactaatagcatataaggggattttacacagctcctgctaggtatcacctgttcagacatcaaggtgactttgtatacgtctgtcttggtattagtgggaatgatctgataggttacattccatatcctaattccagtcatggcagcagccaatttccacaattcaggatgttctggggtaacaataggatgaatcacttttggtctaggaggaatgatcactttgtccatccatttgaatgggtaaggagacacccattccctcagcctgtaggactgccatccctcctctacataatctatcaaatagttgaactcagaatatttggcatttaggctggaaaaatttagccaataatatcctcttggagcccagtcaataaccacctgtaatcaggccctgtaacactactgcttttggagcattacaatcattccatacaatagtttcaactgtaaaaggttccctggtaggttcacttgaacagtctagcagtccttttgttgtattatgtttggtagtgacgggaactctccattcctcatgaggattaagtttaacagtcatgatctgaaaagaattactactaaactcattatgtacttgataagaatcattattagaggacggtacagtccatatccaattttgattagagaaagctaagcagccaggtgacattcctatgcacaatggcgggtatttatatccaattgacaaattaaactgcataccttcttcctctggttgagcaggaaacctgtcatcgttagggactggtataaatgcactactattagtatataggcagcatttgcgaagctgttgaatgacctcatcatttagtatagtttgatttgtaattgcaggccattgtcccattcccaataactggtcagctgtaatattaacaggaggattagagccttgattaagctgaactcgatcgtggacagcatcaacccaccaagtcctgaattataaatattgggattcagataatactgattttgctagaattccccagtcataaggcaccaaacgtttatcctctgctagagcttttaatgtggaatgcacaaaaggggagatggtgctgtattgtttcactgattctttgaaatctttgaggaatttaaaagaaaaactttcccgtgtagcagggagtaactggacctggcctggatgaaaaggatctggttggactactgcctggactgcaggtatacctggagctggctgcgctacagcagcaagcatttatggtataggttgaggagcctgattatttgcctgaggagcctgattttcaggctgcggaccttggggagccgtgtgatcagccacctgctgagcaggatcagcgggctgtggctgatcctgtgccacagcaacaggagcggcaggtatatggggatgtagaataagaggaagttgctaggcctcaggatgcccatactccctggcttgagaaatggctctcataagaggagtgtcattttcaggaatgtatgtaacctgttgcttatgagcagccatggtggtggcaacagcagtggtaaccggaccagaagccaaaaagagattcgagttttgaatagaggaagaatcaagaacctgtaagccaggatgaggtgcgattacctgctgggcaggtcttttagggttgagaaatcaaggctgctgcagtaactgcaggacaggcttcgagggagcctgatgcaccaaaggagaagcagaagtgagagatggataaccaggctgtggagggatagggttgagggcctcattgccaggccaaacaggcagaaggttgagagccctacagcagggctgaacagagacacagttgagagcctgtaggggccagccctacagggtctgtgggtttttctccccgtgtgcggagacaagagatcatagaaacaaagacaaaagacaaagagataaaagaaaagacagctggggctgggggaccactaccaccaagacgtggagaccagtagtggccccaaattccaggctgcgctgttatttattggatacaagacaagggggcagggtaaggagtgttagccatctccaatgataggtaaggtcacgtgggtcatgcatccactggaaagggagcctttccctgtttggcagccgaggcggagagagaggagagacagcttacaccattatttctgcatttcagagacttttaatactttcagtaattctgctattgctatctagaaggcagagccaggtgtacaggatggaacatgaaagcagaccaggagcatgactactgaagcacagcatcacagggagacggtcaggcctctggataactgcaggcaggcctgacttatgtcaggccctccataagagatggtggagtagagtcttctctaaactcccctggggaaagggagactccctttcctggtctgctcagtagcaggtgcttttccttggcactgacgctaccactagaccatggtccgcttggtacgggcatcttcccagacgctggcattactgctagaccaaggagccctctggtggccctgcctgggcataacaaaaggctcacactcttgtcttcttgtcacttctcaccatgtcccctcagctcctatctctgcatggcctgcctttttctaggttatgattgtagagtgaggattattataatatttgaataaagagtaattactacaaactaatgattaatggtatttatatataatcatatctatgagctatatcagtataactcttgttattttatatattttattacactggaacagctcgtgctctcggtctcttgcctcggcacctgggtggcttgccacccacatctccccgctttttattaactaggatcaccattgccatcattgcttgtcgttgactttggacttgtcttcggattccttgcgggatctgcagactaaaagtagacaacataagcataccaatattaataatgccagtgacaacaatgatcctctgaggggtttgatccatttaaagggattaagatcagataattctttagctattccttcaaaaatgtctgagcccagaacagtggataaatgagcctgtgaagcctcaaaaatttgttctttaagttttgaaatatccaaggttaagttatcatcccaggtttttaaatgtcttgagaccgattcccagctatgctgatctttattataagcataaggtgttatacagtaatcagaagtattccaatcacattgtaattgcatacggtgttccaaattcataactgtatctcccagccatattacactttggtggagataattaatttgattagctaacttttgatcaatttgagtctgagaattccaaagtctggaggagtttttttgccatgcttcaacatattgagtggtttgaacagaactgtggatctcaactccagcggttgccactgttgcagaaaccgcaattagacctgcaatgactacaataacagtaaaaataaatcactttgttcttttcaggatacctttaagaacttcattgactatgtgtatagagggggaagactcccatggatgatgtaaagaaactggtatccataccccctccctagcccttacgaatagaatacttgttgtgggattaaaagtagcatcaatgcacatgaacagcttacaattatcacattctatattttgtgtattgggaatgataattatatttccaaccaacagcatgtaagggggtttgacacagctcctgatacgtatcacctgttcagacatcaaggtgatgttgaatgtgggtgttttgatattagtgggagagagttgataggtagcactccatatccttattcctgtcatagctgcagctaatttccataattcaggatgttctggggtaacaatgggatgaatcatttttggtctagaaggaacaatgcctgtgttcatccatttgaatgggtaaggagacacccattctctcaacctgtaggactgccatccgtcctctaatattgtaacaaataattgaactctgagcatgtcgtattctggctggagcaatcccgccaataatggcattacaattattccataaaattgaattcaccagaaaaggtccctttgtagattcctttgggcagtctggcagtccttttgttttattgctgttagtagtgaccagaacccaccattcctcttgtggattaagtttaacagaagttgaaaagaattgctactgaacacattatgtacttgataagaatcatttgtaaaggacggtactgtccacatccaattctggtaagaataaactaaacagccaggcgacatcccagtgcatagtggtggatatttatagccaattgacagattaaagtgcataccttcttattctggttgagctggaaacctatcatcattagggaccggcatgaatgcactattattagtgtaaacttctactgaggagtccatccaggagacagactgaattaaagggggaaaagaacacatgcccagtaggtataattttgagttgcccaaactggtggtatactcaccactgcactgactaccataaaggcagccagaattatattacctgtcgttttggggattcatttttctcttaatgatttttctgttgatgggataagacctttatttgaccccaagttggtggagttaaatgagtggtgttgtaggtcacacggcgagattttgtctcaatgtcgaggtcatgaagtttatgtgtcaggcggtgatacttgctctttggtttcagaggggtctttgccttttgtttctgggagtgtttcttcttgggagttatggtgcaatttcagttgtcgggagggaacccacacaggttgttgtccttttcctggggaaacacaagcaaaacccctaccccatgttacgacagtgcctaattcccatttgttagtttttgcatccttccaccatacgtgcattcctttttgtggatcaaatttatttccagtgaaatgttgttctgctgttgtaaaaagttgatttcttagtaggtttaagaaatttcagtataaaagcagccagatttaactaactgagcataaggggtagcagcatccctctgttttagtgtcctgtttccgaagttgctctttgagtgttttattggctcgttccaccaaggtctgtccttgagagttataggggatgccagttgtgtgagtaattgcccatgtctgagtgaactttttaaaagcagcactagtgtagctggggctgttgtcagtttttagtttcttgggacagcccataaccgagaaacatgaaagtatgtgtcatttaacatgagccatactttccccctgtttgacaagtggcccagacaaaatgagaaaaagcatcaatagttacatgtataaaagacagcttgccaaaagcagcataatgagtcatatccatttgccagagagcattctgtgaaagtcctctagtgttaacttctgaagaaagtggatgtaaaattaacacttgacaagtaggacagtgacatacaatggttttagcttgtttccatgtgagggggaacttttttcagagtcccacagcattgacatgagttaaagtatgaaaattttctgcatatgtaaaaacgggagcaagtaatgtatcagctctggcatttgctgccaagagaggtctggggagggttgtgtgaccccgaatatgagtaatgtaggaaggagaagaccttgatctgagtatggactgaaacctttggaaaagaaaaagtaggttgtcatcaggcagaaatttgattcaggcagtttcaatgttgtgagcaacatgtactacatacgccgaatcagaaacaatgttaactgcttcagggaaatattcaagaacagccatgataccaaacagctcagctcactgtgctgaaatagctcctgtgttaagaacatgttctcttggacccatatatgctgctcggccattacaggaagcatcagtaaaaacagtggcagcttcagctaatggggtgtttctagtaatgttaggcaaaatccaaggagtttaaggaactgaaataattttacattaggatagtgattatcagttatacccgggaaacctgccaaatgtacttgccaagagatgcaggttgcaaaagcctgttggacttgtaatcgggtgaggggaacaatgatttttttgggctctgtacccaaaagatgaaggagacgagaacgagcctgaccaattaagatagaaatttgatctaagtaaatagtaagtgtccgtaaagagctgtgtggaagaaaacaccattcaattaaattatgtccctgaataatgagtcctgttggtgaatgttcagtaggaaaaattagtatttcaaaaagtaaatgtggattcactctggtaacctgagactgttcaatgcgtttttctataagttgtaattcagaatccacctcaggagtcagagaccttttgctgtgtaaatcaggattgccccgtaacgttgcaaaaagattagacatagcatatgtaggaatgcctaaggagggatgaatccaattaatatctccaagtaatttttggaaatcatttagagtttttaaagaatctcatctgaattgaacttttttgggcttaataaccttgtcctctagctgcattcctaaatagtgataaggggaagaagtctgaattttttctggagcgataaccaaaccagctgctgcaactgcttgttgtactgcagagaaacaagatattaatacagagcgtgaaggtgctgcacaaagaatatcatccatgtaatgaatgacataacattggggaaactgatctcttactggctttagtatggtccccacataatattgacaaatagtagagttattaagcataccttgaggtaggactttccaatggtaatgtgctgcaggagggatgttgttaagggttggaactgtgaaagcaaatttttcaaagtcctgaggggccagaggaatgtaaaacaagcaatctttaaggtcaatgatgataagtggccaatacttgggaatcatagtgggggagggcaaaccaggctgtaatgtccccataggttgaaggacagcatttgctgccctaagatcagtaagcattctccacttaccagacctcttttggataacaaaggcaggtgaattccagggagaaaaagagggtttgacccaattttaactgttcaagaaccaaaatatgaagtgcctccagcttattttttgggagcagccactgatctacccaaaccagtttctgagttttccaagtcaaagggatgggatctggagacttgatagtgaccacttctaaaaagaataaccaagtcctgtagaatctggtttatgggtaggtataataggctcggtgatgccttgtgctgattttcccaagcccatatcttgaacaaatcccatttttgtcataatgtctttactttgctggctgtaactgccttgtggaaaagaaatctatgtcccccattgatataaaagatcttttccccacaggttaacaggaatgggtgtaatgagggggcagatagttcccatttgtccttcagggcccatgcaatgtaaaattgtggagcttgcatatacttctgaagcgtcaccaacaccaactaatgctgtggacatatgctcctttagccagtgttggggccattgatgtaaagcaataatagaaacatcagcacccgtatcaatcattccctcaaacttcctcccttgaatatgcacagagcacacaggatgagtgtcagaaattttgctggcccaataagccactttgccttgataatctgtgctaccaaaatctctgtttctcatacaagaactggatcctaaaggaatgtaagggagtatcagaagttgagcaatgccgtccccagctgccacattccaagggactgcagagctaatgacaatatgaatttcacctgaatagtcagaatcaattacaccagtatgtacttgagcaccttttaaatttagacttgaatgaccaagtagcaaactgacactgccagtcagtaagggaccaaaaacacctctaggaacagcaataggcagctatccaagcaacagagaaatgtctctggtacaagagagatctattgctgctgagcctgcagtggcaggagacaaacactgtactgagattcctgctggggctgggccattagatcctgtggcacaaattgctgaagtgggaattggggtggaggttgaatcgattggactgggaaggcacccatctggctggatgccaggggctgggagttgaggaatgcgccattgtttagaggggcctggggccagcccctcgttccatttccctggttgttaagcgactgtaaaggattaccatcaatatcaaatctcgaatggcattgagcagctcagtgatttatcttttggcatcgtgggcataaagtagaaggtgggactttctgttgttgaaaaattttttgttgttggtggtggtggggttgaaaagaatggcaacatgtacactggggacaatttcttttagcatgtcctgtctggccgcatataaagcattggccagtgaattgtccaggcgttcgaatagaggccatggcttgtgccatgatcattgctgtgtgcagagttcctcccacaccttcacaggctttaatgtaggaggtgagtatatcacacacacacacacacacacccatggaattttacctttaacagggcgaatagccacctgacaatctggatttgcttgttcataagccatgagttctacaacaagtcaatggccgtggctcagggatagctttttctgctgcgtcttggagatgggcaataaagtctgggtagggttcatgttgtccctgtctgactgccgcaaacgatgggcatactttgccatcatcttgaatcttttcccaagcatctaagcaacatttccacagttgttcaataaccacatcatttactatagtttggtttctaattgtagcccactgacccattcccagtaactggtcagctgtaacgttaacaggaggattggagccctgattaagatgaatgtgttcctggacagcatcaacccaccaagtcctgaattgtaaatattgggatttagataagactgactttcagtcaagtgagcattttttaagaacacgttgtactgagaaccacttaagcattgaatgcggagaaagcagtgctacctcagttttgctggaagtagacttctttgatagttttctttctttgatgaagtttctgtattttcatgttgtaagtggaaatacttttttttgtttgtttgtttcatttgccttggagccaaagtttctgttcctggtggtcgggaaactgcctgccggccaactgacttgaaggaaaactgtggtatggagctctgcttgaatttttttttttttaatatttttatttttttctttgaatatcatcagcttacttgtctggcaagggcagaagcctggggttggcctgaactctgccaaacaaatatcaaagtgtatttaatagttaaatttgtgccctttcccttcttgctgcacccatgttgtcacttaacccccaggagttatttattatctttttgtcaaagtcaggctcatttggggtaatgtgatgactgtttaggtttacatgaccctcctctcctttccctacccccaaatatgtatatatacatatataaaatatgtatatattttacctatataaaatatatatatatacacatatatgtatctatattcctttgtttctttgcctgcttatactggccataaaagagggagctgccttcaatgtataaagtataagaagagtgccagggaatgccataatggaggtttttggatctgaatttggaccatttcactaaagagaacatgagtttgctcaaccctttcctcacaagagggagggccccggttccccagacttctccacgcactggctccataaaggccagctttggccaggctgccacaggggcctgaggagctcactctgggcctacctggtttcagttagagggtcctcctgttatttttccatttaaaaagtatgtcctcataaaactgtactggaaggatgggtggcaggaacttgtatagttcagcttccaacactttggaacagattaaaaagggaatcttttaaataaaaacttataaaaataaaaaaaaatagataagactgactttgctaaaatctcccagtcatagggcaccaaacgtttatttatcttctgctagggcttttaatgtggaacggacaaaaggagagttgatgctgtattgttttactgattccttgaaatctttgaggaatttagaaaaactttcccaaggagcagggcgtagctgaacctgagctagaagtatggggtcaggttgaactactgtctgaactgctggaataccaggtactggctgtgccccagcggaaggcagttgtggagcctgattatttccctgagcagcctgattgtccggctgaggggcttgattatcaggctgttgatcttgatgagctgcaggatcagccgcctgctgagcaggatgaatgggctgtgggtgattttgtgaccctggggtggcaggtactggagggtgtaaaattacaagaaattaccaggcaccaggatccccatattcccttgcctgaactatagccctcataagcggagtgtcatttccagggatgtatgtaacttgttgcttatgagtggcaatggtagtattggcaacagcagtagcgaccagacgaggagcagaaaaacggttggaattttgaaagaaggaagagttgagaacccgaaggccaggatgagaccagattacctgctgagcaggtctttcatgggcctgaaatccaggctgccacggcaactgtggaccacgcttcaagagagcctgaggcttcaagggagcctgatttgtagaaaaggaaccaggcttcaagggagcctgtgactccaagggagtccgattagcagaaaaagaaccaggcttcaagggagcctgtgactccaagggaatccgattagcagaaaaggaaccaggcataagaaaactaggctgtggagggatagggctgagggcctcattaccgggccgagaattgaaagcctcctcatcaggctgtatagatatcagagcctctgtactctgggctatcgagctgcatggaaacataatttagagccctgctttcaggccacctgatctcatctgctatctgcatggctgcagcattgagagggtgaggaaaggcaggagggtctggctgcaatggctgctgatacatttcagctgcgttttgctagttgggggaaataagttcattcaggtcagttaaaagttcatcataaagtaataactggggtgcagtaggctctggcgtacgtggtagcaccaaaggaatgtcagagtggaagtctgcctgtaaaattatggtctcaatctgtgcagtatcctcaggggaaagagaactgagaacttcctcaacctcatcagaggagaggaaacagggatcagtctctgtattgtcctcctgagtctgtaaggagtctaggacagcaaaccaaagcccagattgaccaaatggtgggtggaataaaatgtccccctttatgggcaattttgaattgtctgccaatctcatcccaatccttaagttctaaagttccctcagtcagaaaccaagggcaaagaagatccacaacctcaaacagttcaattaacttatcagtagaaactttaacccttccttctttaaggagagtttttataaaatttaaataagctgagtacttagtactggcctgtcccatggtgtccccaggatactctgagtgctcaggcttaccaccaagcttgtcaaccgcaatcctcaggaatcttttgtcaaaatcctccactgagtcccatgctcaaagtgcaacttcacacagcgagggagagccccacattgggcgccagatgtaggggacagccctacagggtctgtgggtttttctccccatgtgcggagacgagagatcatagaaataaagacacaagacaaagagataaaagaaaagacagctgggcccaggggaccactaccaccaagacacaaagaccggtaatggctccaaatgccaggctgtgctgttatttattggatacaagacaagggggaagggtaaggagtgtgagccatctccagtgataggtaaggtcacgtgggtcacatgtacactggaaagggggcccttccctgtttggcagcccaggtggagagaggagagacagcttacgccattatttctgcatttcagagacttttaatactttcagtaattctcctactatctagaaggcagagccaggtgtacaggatggaacattaaagtggaccaggagtgtgaccactgaagcacagcatcacagggagatggttaggcctctggataactgcaggtgggcctgactgatgtcaggccctccacaagaggtggtggagtagagtcttctctaaactcccccagggaaaaggagactccctttcctggtctgctcagtagcgggtgcttttccttggcactgatgctactactagaccatggtccacttggtaacaggtgtcttcccagatgctggtgttactgctagaccaaggagccctctggtggccctgtccggacataacagaaggctcacactcttgtctactggtcacttctcaccatgtcccctcagatcctatctctgtatggcctggttttttctaggttatgattgtagtgcaaggattattataatattgggataaagagtaattactacaaactaatgattaatgatatgtacatataatcatatctgtgatttatatctagtataactcttgttattacatatatcttattacactggaatagctcgtgctctcagtctcttgcctcggcacttgggtggcttgctgcccacagaagcctcattaccaggccaaacaggcagaaggttgagagccccacagcagggctgaacagagacagagttgagggcctcattgctgggctgaacaggcggaaggttgagagccctacagcagggctgaggaaagacaggagggtctggccatgatagctgttgatgatatatttcggttggagtttgctggtttggggaaagatcatttttaaaggtcatcaaaaagtgataatggaggcatggtaggctctggtgtaggtggtggggccaaaggaatgtcagaatggaggtccgtctgcagaatcacggcctcaatctgtgcagtatcctcaggggaaagagaactgaggacttcctcaacctccttggaggagaggaaagagggaccagcctccatgttgtcctcatgaggatgcaaggagtctaggacagagtgaaccaaagcccagattaagcaaatgtgggcagaataatatgttcccctttatgaacaattttaaattgtcagccaatttcgtcccagagtttgagttctaaatttccctcagtaggaaaccaagggtaaaggagttctacaacctcaaacagttcaattaacttatcagtagagacttttacacctcttttttttttttttttttttttttttttttttttttttttttttttttttgagacagagtctcgctgtgtctcccaggttggagtgcggtggcgcaatctcagctcactgcaagctccgcctcccgggttcacgccattctcctgcctcagcctcccaagtagctgggactacaggcgcccgccaacacgcccggctaattttttgtatttttagtagaaacggggtttcaccgtgttagccaagatggtctcgatctcctgacctcgtgatccgcccgcctcggcctacctctttctttaaggagagtttttataaagttcaaataagccaagcacttggtactggcctgtcccatggtgtccccgggattctctgagtgtccaagcttaccaccaagcttattgactgcaatcctcaggaatctgtcattggtagtccttcgctgagttccacgctcaaggcgcaccttcacacagtgagagagaagacctcattgggtgccagacgtaaggtccagccctacagggcctgtgggttttctcttcatgtgtggagacaagagatcataggaaaataagacacaagacaaagacagtaagaaagacagctgggcccagggggccactaccaccaatgcgtggagtccggtagtggcccagaatgcctggatgcattgctatttattgtatacaaggcaaaggggcagggtaaggagagtgagtcatcccaagtgattgataaggtcaagcaagtcacttgtccacgtgacaggcagcctttccctttgtggtagccaaagcagagagggaggacagcatacgtcagcattttttctatgcacttatcagaaagatcaaagacgttagtacttttactaattctgctactgctatcttctaagaacttaaaaggaggagccaggtgtacaggcggaatgtgaaagtgaacaaggagcatgaccactgaagcacagcatcacagggagacgtttaagcctccagatgactacgggcaggcctggctactgttcgacctcccacaagagctggtggagcagagtgttctctaactcccccaaggaaagggaaactccctttcctggtctgctaagtaatgggtgccgccttcccacgcactggcactactgctagaccaaggtctgctaaataacgggtgccttcccaggcactggcactaccactaaaccaaggagccctcaaggagcccttatttgggtgtgacagagggttcatactcttgtcttctggtcacctctcacagtgtcccttcagctcctgactctgtatggcctggtttttcctcagttaaaataacaaacattaatactaaaaactaataattgataatatccatatataatctctatatcctatgtctaatataactttcttttatcctaactattttctttattatattggagcagcttatgccttcagtctctttcctcggcacctgggtggctttctgcccacactgactgagccaagtgaatggaaagtaagtcacactctggtgatatacacgtggtaaacgtgaatgcagtgatcttcataccatatctactgagccacgtgaatcaaaaaatagactcagcagagtgatgttcatgcggtaactggaagtcaatcatcttcataccacatctaactgagtcaagtgaatcgaaaattagtcagactctggagagcaaagtacatgtcataaatttaaatgacaggctctttatacccctctgactgagccaggtgaattgaaatgtagttagactctggatagtgacgtacatgtgacgaatatgaatgcagtgatattcataccgcatctgactaagccaagtgaattgaaaagtggtaagactcctaatagtgacatacacgccatgacattgaaggcagcaatcttcatactgcatgtgagtgagccaagtgaatcaaaaagaagtcagactctagatagtaacgtacacacagaaaacttgaatgcagcaatcatgttacaggaaaggggccccaatccagaccccaagagagggttcttgaatctcacacaagaaagaattcaggatgagccctcagtgcaaagtaaatgcaagttttttaagaaggcaaagtggtgaaaaaacagctactccatagacagaataggacattcccaaaagtaagaggaggaacacatctatcctaggtacaatgcttgtatatttggggagatgtgctctgctacaagggtttgtgataaaagattaatgttctcaattactgtattttgcaagaaccgatattatcatctttgaagcaaaattaggaatgcctttgttctccagatatcgacatatctggacattgccacgtttgggtctgtttagtaaacattattaatttgttcccttagccataaacatctagaggctaggaatgcctgactttctcagaatccagcccagaaagtcccagcctcattttcctagccctccctcaaaatggagtcgctttggttcaaatgcctcggacatatctccccactccctttacaacaggacccttaatcctaagggttgcagcaagatgaagatctgtcttgtgtaacttcttcaggctgaattggggcaatgatattgctgcctaactattacagtctcttgcattcgggatagagaaaagctcagagagcgttgatatggtaaatgtcattcataactctgagttctgacgaaaggtgatatctggaagattagtaagtgtccaatttaaaaaagcattgagtgagcttgtcttgcattcctacacaaagagctcaaccacaatattttccacagcagcaaagcaaagtaagtaaaattattccaagtaaactaaacaggaagtctttccaagaactaggcagttgttgaaaccaagccaatatagggtcgattgacagcacgccaatggcagagatatgagtgtctaaagctttcatagcctgggtaatagtatgtgaatagtcaaaaacatacacacaacattcgattttgatcaaagcacatgtttccccttgggctgctgttaaaatgtccacatacccagcagtttatctgattatgtagagaggctaaagcctatgcccactcaataaataagttaatctctgcatgattccaacttctacccaaaaggagaatcccaatccatatctttaggttacccatctctttcatttcttctgaacaggagtcggaggtcactgcttggctcacagggataaacgggatcagtctgtgttccaccagattgcgggacttcataagagacaggtttcattcgagataagtggacccagctgtttattcccagaagtttaactatagctggcatactgaggagaacttgatagggtcccttccattttggggaaagttgatcttctgggaatagttccaagtttctaacaggactcaatctcctggctgggttgtaacaagagtctctttcttagtgggggaagggagtctttggtttccatatttaaggagtgcattttgcatttgttctaagttgatcacataattctgtagcttgaaagtatctatgtctattaggaggtctgtagttaagaaaggccttccatacataatttcaaaactggtgagccatagatttcccttaggagccactcaaacacttaataaggctataggtaataaagacagccaggtttctgatatctcctggcatagtttagcaagagtcctttttagagcttgattagctctttctactttccctgaagactgtggcctccttgccaagtgaaggcggtactgaattcctagggctgaagatacgttttgggtaattgtcactgtgaaacatggccaatgattgctctgtaaactcttaggcggaccaaatctaagacttatttcctttaacaggagtttagaaacttcaattgccttttcagaccaggtaggaaaagcctgaaccaacaagtaaaggtgttaatgactaacaataaatatttcaaccctttacataggggcatctgagtatagtctatttgtcagtcttcaacaaggtacattcccctatgctaaacaggacttattaggggaggaggtaaagattggttatttgggttattccgggcacataggtcacaggcctgagttacctgctttaccattttaagtaagtcttttcctacaaaaagcctgggcattaattaaaacagggaatctctttccagatgagtagagagagtcatgcaaatacttagctattttccactgattagcacctggtagtaacagcttgttgtcattgataagccagccagaaggatcttgaattaaaccctgacctttagcccattcttgttcctcttcagtatacccaggttctgtcattaccatggctgagggcactaacatgctgacaggtccaactagctcctttaatgctgctgtcttagcagctgcatctgcaaaggagtttcccttagccgcactagagtctcctttttgatgtcctctgcaatggattagagctacttccttgggcagcaaaacagcatccaatagattccgaatttctaagtgatgttttatagggatcccttagcagttggaaggccctgttccttccagatagcagcatgagcatgaagtgccagaaaggcatacttagaatcagtattgtggggaaaagcaagagagatcagattgttactgtgtctgtgtagaaagaagtagacataggagactccattttgttatgtactaagaaaaattcttctgccttgagattctgtgaccttacccccaaccccgtgctctctgaaacatgtgctgtgtcaactcagagttgaatggattaagggcggtgcaagatgtgctttgttaaacagatgcttgaaggcagcatgctccttaagagtcatcaccactccctaatctcaagtacccagggacacaaacactgcagaaggccgcagggacctctgcctaggaaagccaggtattgtccaaggtttctccccatgcgatagtctgaaatatggcctcgtgggaagggaaagacctgaccgtcccccagcccgacacccgtaaagggtctgtgctgaggaggattagtataagaggaaggcatgcctctttgcagttgagacaagaggaaggcatctgtctcctgcccatccctgggcaatggaatgtctccgtataaaacccgattgtatgctccatctactgagataggggaaaaccgccttagggctggaggtgggacatgcgggcaacaatactgctctgtaaggcattgagatgtttatgtgtatgcatatctaaagcacagcacttaattctttaccttgtctatgatgcagagacttttgttcacgtgtttatctgctgaccttctctccactattatcctatgaccctgccacatccccctctctgagaaacacccaaaaatgatcaataaatactaagggaactctgaggctggcgggatcctccatatgctgaacgctggttccctgggtccccttatttctttctctatactttgtctctgtgtctttttcttttccaagtctctcgttccagctaatgagaaacacccacaggtgtggaggggcaacccaccccttcacaaagctatttccatctgtaaaccattctactttgggattatctagaggctcatcttttaaatgtggacggctagagtaaacttgctccataacttgtatccaagaatgatctggggtgcctgtgggttcaggcaagtaggtagctggattaaaatctggcatactttaagtgttgtatcaggagcatctagcaacaaagcctggtatttattcacaggaaaggagaagaagcattttctgtctgccttgtcatttccaaaacatactactgtttgcagctgagttaataaaccccttcccaacaagggtggggcattcaggagaaaaccaaagtccctgaagagcagcttataggataggtaaaatggcatctatgggcctgtctatccccttgaccatagagttttgggatgacagaggcccattataatgggtcaaaacagagtaagcattctagaaggaagttaatattattacctgtcatgtcaagggttatctgaggcttctcagaagatatggctagttgtccgacgggaggtgtagcggaaggtcttgggccccgtcactcttgggcttccctggttattttggcatctggtttgggtgcagatggctgctgtaaggtacatggatgtgctttggtcaaggaatagccgaggcagatatccaggcctgcatgactcagtgagactgctgcacaggcactcacctccacttgttatataacctgtttgtgtaagctcatacttggctctacaccactactgtctgtaaaaggaataactgccctgctgacactgtgcacggggactcaacatggctcagcatcgctcttgtgcaggcactggtgctcagaaagagagtgaagctactgacccctgtaagggagaatgactgtctgacaggtggatagaggggagccaggacatggctcagcttgtgcccagagagaaaggttaagctactgatcttagagctggccttgcagaccagttgtgcagctgtgagtgggagctagctgctgagagggtccagagtcagagcagacagccaagataaaggcgaacagtataaaagagctagtgtgagagaactgctgatgagagagctgctgaataaaactacatttcacctgtctacaccgccccgaatgttctttcagctattcatctatccatccactcctctcagacctcatcatgggctgcaccctaaccctgagcatgacatttgtcatagtcacggccctggacctaacagctccctttggaggaagactgggcaatccctcttccaatgaccagtttccttacagtgtgcacactgattcatgcccaaaacacgctgacttggacatccagctctgggcttctcacatttcagcttcccttcttcactccaagagccaggaaagaaactctatgtaggaggtgagcttaaggctgcagccaagagctgcaccttgtgggaggtccttcttgctcctctttctgcttcctgtgctttgtccccgttattaaaaactaaaaatgccatatccaaaagctgtttaataggagtctagggacacatagtcacatagtgtgtttttgtttttttttttttagacacagtctcgctctgtcacccaggctggagtgcaatagcgtgatctgggctcactgcaacttccacctcatgggttcaagcaattctcctgcctcagccgcccaagtaggtgagattacaggcacttgtcaccatccccagctaatttttgtatttttagtagagaaggggtttcaccatgctggccaggctggtcttgaactcctgacctcaagtgatccacccccctcagcctcccaaagtgctgggattacaggcttgagccaccacgcccggctcccatagctgctttttgtagtttcctggggatatcaggggcagactgggtcataaaatgtcctcccaaaagggtttgtctctcctttgaggcaggatcagtgatattatacttcccgattgcttcaactaaatgcccttgaaacaaacctggattctcatctttatcctgagaatcttccttaacctgttcatagataacaggctttttcatacatttcttcatcccttccaacgaacaagtgaccatatgatctctcctccccaagtgctcactgcgcctttgataattccactctgcatcttgatctggaactgctatacttcctgcctgatacatagtatggtacgggttgcgagccaatacctcatctgcatgggtcctagctgtccccaaaatgcattgtttctcctccactgtacaacacagagacaacaaaacatgcagatcctcccaagttaaactataggtcagagttgatttctcaaactcatctacaaattttcctggatcttcagagaaatgaccaaccttctctatatatagggtcaaaccagacggagaaaagggaacatgtactctcacagtgccctcttcccgatttgccacctaagtggacaaagatttccctttggaggttgatagcaggctgcactataagtagtactcggtgggctaagttctttgtgggaatggtgggtacagagtgggactagctgggtaaggagaagggacgaagggttctcaagaactttcaggtggactacagggagaaagaactgacacatacgaaccttcagagctgacagaaaggggttccgctccacccaaaaatgcctgctgaaccacagcagggcttgcattaaaggatcacctagtatgtctaaatctttttcttcttttcctctcatcaaacatgattcacattatccaaataacataagtgagctgagctatgaatcttagataaaccacaacatggactttgaaaaaaatgtcgaataaggcaaaataaatgaagaggatttagatgggaacaaccagagtaaccaataacagcagtgaggattggaaaagcaaagcaaacacggtttgcccgaatccaagaaaagaaagtttttttattttcttttgagacagagtctcgctctgttgagaagactgctggagtgcagtggtgcaatctcagctaactgcaaactctgactcctagattaaagcgattctcctgactcagcatcccaagaagctgggattacagatgtctgccactacacccgggtaatgtttgtatttttagtagagacggggtttcaacacgttggccaggatggtctcgaactcctgatttcaggtgatctgcctgcctcggcctcccaaagtgctgggattacaggtgtgagccaccgcacttagctacaaaggagattttttagtgtgcaaaaccaaacaaaacagcaaggagaaaagtcccctgatttccatcctagtgcttctcaatcacactcagcacagcagcaacaaaacacaaccacatctatcgaatcttactgctcatagctgttaaatatcaaatctcaatcagcaattttagagccggatcctccaatgcttttggttcccagtgtttcacaagcaaacggacagaaatcgggagggacataggagaagaatcagttaaaatccctaagaccagttaaatgaagtctcctgaaaatgacactgaaacggagacagcaaccaagacaaggaggacgaggcagactaatacaaagagcatagcctgcggtgtcaaacctgttttttagccgagaggggctttactgggaggggcctctaaccctcctcggtcgggcctctaacccgaggtcggtcaagtgtccttgccttttattaagaggggcctctaacccactctcttttaggaaagactctaactccattaagttgggcctctaacccaatcccattctttacccgggcactccaccacttacccaaagtcagtctactgactactgcagtgctgcagtctacttcctttgggttgggggagtttcttcagtatcgtcccttccatcattcgccagaaatatgttataggaccccaacacttccccaaagcactatagtcccatctgtggtggccagaaatacgtcacaggaaaagggccccgatccagacccaaagagagggttcttgggtctcgcgcaagaaataactcagggcaagtccgcggtgcaaaataaaagcaagtttattaagaaagtaaagtggtgaaagaacagctactccacagacagagaagggcgttcctgaaactaagagaaggaacgtatccaccctaggtacaatgcttgtacacatggggagaggtgttctgttacaagggtttgtgataattaactttaattattacattttgcaagaatccctattactacctttaaagcaaaattaggaacgcctttgttctccagatatccagctatctggacactcgggtctcttcagtaaacattaatttgttcccttaaccgtaagtatctgaaagctaggaatatccttctgagaatgcaggcccgtaagtcccggcctcatttttctagccctcactcaaaatggggtcgcttcaggttccaacgtctctgacagtcatactacatatgactcagccacgtcaatggaaaaagtagactggatagtgacgtacccgcagaaaacgaatgcaacaatctgtcatacagatctgacggcagtcagattctgcagtgaagtagaggcggtaaacttgaatgcaacgatcttcataccgcatcccacaaagccacgtaaatccaaaagcagtccgactctcgatagtgaaacacatgcggtaaacttgaatggaaagatgtttatactgcctcggatagagacacgtaaatgaaaaagcagtcccacttgggatagtgaagtatgggcgctcaacttaaataggaccgtccgcatatcgtatgtgagtgaagcaagtaatagcaaagggcagtcagattacggagaccgatggcgactgaagtgagtgcagtaacctttaactcaatgatcgtcacgccgcaaccaagtgaaaccgaaagcaactaagcgctcgaaagcacgcccggccagctcaaaaactacggcgctgatggaccccagtgatccgacgtaaaggtgcaaacgtaaagcgcacacggccaatttaaaagcagcggcgctgataggcccggacgaaccgacgtgaacgcgtagaagtaaggtacgcgcgatgagcttaaatacgcgagtactaagagaccgtgaaacccggatttaagcgtgtaaacgcaacacacaacctaggaggtcagtaacaacggtcccaactgatgcaaatggcccaatgcaaacacgttgacaatctcccgttagcgacagtaacagacgctaagcgcccaatgcgaacaaaactcccgcttcgaaaactacacctcggaatccttccagcgatcaagggccagcaacaccacaagccttccactgtatcaacaccgttttcaaaacgaaaatgttaacgatcggccactgtactccttctcccacacatcctaacctcagggtgacagatagcaccctgaataactctctctcctacgttgagattgtgtatctttatccaaatctgaacacctgcgtaagtaatattgttactattttggaggatattcactttccttttttgctcccataactcccgagagaagcagccattttaaatttgcatgccccgccgtgccctgcctgccaaccactgaacagaaaagcgcctgtaaatcactggaatcttgggaaagctccttcggcttcattgcccttcaggaggaaaaacccacaacggaaaagacacgaagagctctaggaggctcttctttcctcctcctccccctccccttcccctcccctctccctccgcctcccttcccctccgcatcccctccccctcccttccccctccccctccccatctcgtcctgacctagctggcatccaacattactttaaactttttttcacacatacgttgaaagaattgtttggtgaacacccgtatgcccatcacctaaagtcatcttgctgtacttgctttattacatgtgttacagacgtctaattacattttttttttcttttttttgagagggagtctcgctctgccgcccaggctggagtgcggtggcgcgatctcggctcactgcaagctccgcctcccgggttcacgccattctcctgcctcagcctcccgaggagctgggactacaggcgcccccactacgcccagctaattttttgtattttttagtagagacggggtttcaccgtgttagtcaggatggtctcgatctcctgacctcatgatcccccgcctgggcctcccaaagtgctgggattacaggcttgagccaccgcgcccggcaattacatattttgtatagctgcacacatggagacaggtactcaggtctcgtccctctagccatttctcaactgtctggtccggcaagggcaagttttcgaggaggccagggtgcagccctcaggggagcacatgctctgactggttgcagggctgggcggagccttgggaaaggggcccctgtaagagttaaagaaagaggatataaacacgaaaagagtttggctcttgttgcccaggctggagtgcaatggagcgatctcggctcaccacaaagtccgcttgccaggttcaagtggttctcctgcttcagcctcccaagtagctgggattacaggagcgcgccaccatgcccggctaatttttgtattattgtattttatttattttttttttttagaagagacacggtttcaccatgttggccaggctggtctccaaatcctgacctcaggtgatccacccgcctcggcctcccaaagtgctgggattacatgaggtaccgcacccagccccacattactatcttcaaagcaaacttgaaagcaacgatcttcataccgcatcccacaaagccacgtaaatccaaaagcagtccgactctggatagtgaaacacatgcgggaaacttgaatggaaagatgtttatactgcctcggatggagacacgtaaatgaaaaaacagtcccgcttgggatagtaaagtaggggcgctaaacttaaatataacgatccgaatatcgcatctgagtgtgccaagtaatagcagagaccagtcagaatacggatactgatgtgggtgcagtaacatttaatccaatgaccgtcacaccgcatgtgactaaaccaagtgaaacctaaagcagccacactctccaaagtacgcgctgctgacttatacacaagtgtgctaacaggccccgaagatccgatgcaaacgcgtggaggtaacgaaagaagctcccattccaccttgtcagcagacagcgtttgaagatctcctttgctgatgtaacgcgaaataacagtaactgatagagcaagttccgcacttaacctgagcctaaacgaccaaggcgctgccggcattagcgttcgtccacggccctcctcctcttagagccaagtgtattaataggtcccgacaatctgagtggagatgacaagaggctcccattctatgagtggagataacaagctgatgacgaaacccgggtgctcccctcattggcacccagcaggcagcaccggcccgctcccggagccctccatcctgcgctttcccaaacccccatcaaaacaccaacccagtctcctccctctcaagccattttccaacctgcctgggagccactctgatctcccagaacacctcattttgtgaattataaaccttttcacaccttctcggtccctgtgtgatgtcaccagtctcgatttccaaaataaatttggggtcagtggtggggctggggtccatctagttctgcagagtgggaacagcacagaagctaccggacttgctgtgcgcatagtccaatttgggtgcaaaagcctccccactggactgggtggcctcttatcagtgacaaaaccaagggatttgctagtccctcatttacacactggttactgagtgcctcccgttgagttgaacacttttacttccggggaaaattcgttgttccagaccaagttgactactgtcttcactggacattctaagaggtgcttttggtcccagggaaataccccggaagctgtgaagtacaacagccttaggccctgtcccaaatattctaatttaatggctgtacggtggggctaggacctcaggatgattcactccaccgaggtatccggtcgtcctgaagtatagccaaggttgagaagcaccgatagacacggaagaattttcactccccttcagcaaagacctttgtaggtatgacctcctttggctgtcattgttcagaatggtggggggtctggcaagagcgagtcttagggctgagactaaacccaatttataggatttaagtcctctagatgggaggtgggacaactgggactgctcacttgttcacatgtacatcggcctggtgtatttccaccagaaactgttcctcattatactgtctgcctgggccgatccctcctgtcataagttgacacaagtaaattgcaaagtcctaatcacctaattttggtggagtctttaggtttttccaaatatatcaccttcaaacgaggataatttgacttcttcctgtccttttttttcttcttctttttcttttcttttttttttttttaagacaaagtctcactctgtcacccagtctggagtgcaatggcacgatctcggcttactgcaccctctgtcttccgggtttaagtgattctcagatctcagcctactgagtagccgggactacaggtgtgtgccaccatgcccagctaatttttttatttttgtaaaggcaaaatttcaccatgtggcctaggttggtcttgaaccactggacccaagcaatcctcctgcctctgcctcccaaagtgccaggattacaggtgtgagccactgcgtccagcaagaataatttcaatctctggtaaatgcacctgatagaactgtgaatttccaacttctttgtcttttcttttctcttttcctttccctctctctctctctttctctctttctttctttcgtttctctcttgttgcccaggctggagtgcagtggggatcttggctccccatagccggtgcctcccggattcaaacaattctcctgcctcaggctcctggagtagctgggattacaggcacaggccaccatgcttggctaattttgtagtttttgtagagacggggtttctccatgttggtcaggctggtctcgaactcccaacctcaggtgatctgcctgtctcggcctcccaaagtgctgggattacaggtgtgagccaccgcgcctggccgttttctctagtttctttaaatttcctcaaaatggctattttgaattctctgtctgaaatgtcacgtctcagttcctctggaattgaacaaatgtggtttggtgagaccatgttttcttggatgatcttgatgtttgtggatgtttgttttgtctgcgtatggaagaattaggtatttactgtatttttcacagtctgggcttgtttctgtgtgtctttcttgggaaggctttctgggtattccaggatatgtgtgccccaagtccaatcatgctgtgattcttacagacttgtagaggtactaccctggtggttattgggggaaattcagccagctatcaggcaaaattcacccctgatattttacgtagttcttttctattttcctgaagtgtcggccagtctgagaaataaagggacagagtacaaaagagataaattttaaagctgggtgtctgggggagacatcacatgttggcaggttccgtgatgccccctgagccataaaaccagcaagtttttattagtgattttcaaaaggggagggagtgtacgaacagggtgtgggtcacagagatcatgtgcttcacaaggtaatagaatatcacaaggcaaatggaggcagggcaagatcacaggaccacaggactggggcaaaattaaaattgctaaggaagtttcaggcacacattgtcattgataacatcttatcaggagacagggtttgagagcagacaactggtctgaccaaaatttattcggcgggaatttcctcgtcctaataagcctgggagcgctatgggagactggggcttatttcatccctacagcttcgaccataaaagatggccgccccccgaagcagccattttagaggcctaccctcagggacgcattctctttctcagggatgttccttgctgagaaaaagaattcagcaatattttcccatttgcttttgaaagaagagaaatatggctctgttctgcccagctcaccggtggtcagagtttaaggttatctctcttgttccctgaacattgctgttatcctgttcttttttcaaggcgcccagaattcatgttgttcaaatacacatgctctacaatttgtgcaatttacacaatcatcacagggtcctgaggtgacatacatcctcctcagcttacgaagatgacgggattaagagattaaagtaaagacaggcataggaaatcacaagggtattgactggggaagtgataagcgtccatgaaatcttcacaatttatgttcagagattgcagtaaagacaggcgtaagaaattataaaagtattaatttggggaactaataaatgtccatgaaatcttcacaatttatattcttctgccatggcttcagccggtccctccattcagggtccccagcttcccgcaacagtggtcttggatgagatctgaaagaatcctctggattaccaggcagagactcttgttcttttcccttactttctcctaaataaatggagtctctctctgtgctgagatgcctaagcaaccctgtgctggttcagacccaaacccagcacagcaccaggtctcactcaaaggcctgctagatccactacctgctaccacctatgccccctcaaagcagtagagctctaggatcaggtggccaagccagccaggattatgtccctccctttagggcagtgagctccctcaagccctgggtgggtgctggaatgctgtctaggagccaaggtttggagtcaagaccttagaaatgtaactgatgttttattctactgcagttaagctcctacggaaaccacaagaaaaaagttctccccactcttggctaactgcaagatgcctccgatgaggcctcctacccaaacctttcttattcgcagggaccaggctttcttactcgcagggaccaggcttcagctccctgactaagaagtcaaataaaggtcgggcgcggtggctcaggcctgtaaccctagcattttgggaggccaaggcgggcggatcacttgagttcaggagacaaacctggccgacatggtgaaactccctctctcctaaaaatacaaaaattagccagccatggtagcgaacgcctgtagtcccagctactcgggaggctggggcgggaggatcgcttgaatccgagaggcagaggttgcagtgagccgacatgaggccacttcactccagcctaggcaacagagtgagactcggtatcaaaaaaaacaaaaaagaaaaaatgtgagcagttgggaagcaataatatgaaaaatgagagcaaaagtaactgcaacattggggaagactaaacaacgtcgcttctggcgttggcttatggatgaccaccctgctttcttcacgttttaactgtctggagtccagaaattagcaatgcacctccttggcatatcaggatgccaacaagcacccttgtccccagtttcaggactcggcggcgtactttcccaatacgcattcccttattctcaatccggttagaagcaaagaagtaataccacccaccaatactttccttatacaacacaaaaacacacacacacatacacaacaccacataatgaaaccaacgcgaatgtaagtaaatctgttctttgtaaaacgtgttttgaccctctttggaaacacggcaataccaagtcgatgcgcagagtggaaaaaaccagctcctatttcatctttctattccaaaaccccacttaaatatatcgtcctcagaccaaaaaaaatcagttattcaactgaaaaaaacatgctacattggatcttagtcaaaaagccaaaaaagaaacaagccctttctttcggccacagcactccttctcccactcatcctgaggtcacggtaagaaaaatgatcctcaagtaaagaagcactctcttccctaagttcacacagtgttccttgttacaatttgtaacattgcataagtaatactgttacaaatttgggggggatattcgctttctctttttgttcccatagctcctgagcgaaacagccattttatatttgcatgccccgccccacaggctccgagctccgtcctccccgcaggctggccctattaccaccatctaacatcatcttgctggacttgctttatgtatttatttaagacggattctcgcactgttgcccgggctggagtgcagtgccgccatctcggctcttgcagcctccgcttcccgggttcacgcaattctcctgcctcagcctcccgagtagctgggattacaggcgtacaccagcacattaggctaaatttttgtatttttagtagagactgggtttcactatgttggccagactggtctggaactcctgacctcgtgatccgcccgccttggcctcccaaagtgctgggattacaggcgtgagccaccgtgcccggtctggacttactttattatatgttatagacatgtaattacatattttgtatagttgaccacacagaaacaggcacttaggtctccgtccctctagccatttctcaaccgtctcgaccggcgagttttcgttgaggcgagggagcgctcgctcccacaggttcgagggctgggcggagccttgggaaacgggccctggtaatctccgctcagtgagtggcgctgcgaagctgcttctgcccgggaaggaggagaggggcctggaaccgccgagggaaccaccagttccgacgccctggggtgggcccggaggaccgagtggctggggcggcacggggcggggggctgggcgggaggagcgggggtccaggaggtgacccaggagggggtaggatcgggctgggcctcgtgggctccctgcccccggagggggcgcgcagagggagggcggtagcccagtgagcgcgaccactacttccctgtgaacgcgagagctcagacaagccacagggggccagagccgagaaaccggaagaccggcgaggagaccatagcacactcccaggaaagagagcgcgagggcttgggccaggatgggggcagtgcgggggctgaggagtggccagattctgggtgtactttgaaagcagagctgatggcctttgcggacagttgggatgaggggtgagagaaaggagtggagggtgactccaagggtttggccagagcgactgccacattcagcctgggcgacaaaagcgaaactacgtctccaaaaaaaaaaaaaagtctgccaggcgcagtggctcacgcctgtaatttcagcactttgggaagccgaggcgagcggatcatttgaggtcaggagttcaagaccagcctgaccaatgtggtgaaaccctatctctactaaaaatacaaaaattactctggtgtggtggcaggggcctgtaatcccagctacttgggaggctgaggcaggagaatctcttgaacccgggaggcagaggttgcagtgagctaagatagcaccactctgcactccagcctggggaacagagtgagactctgtctcaaaaaaaaaaggtcgacaacacataaggctgaaggagacttaaagagacctgacaaccaaaagtgacaagtgatcctgggccagaaaaacctaaaggactttattgggacaattggtgaaatctgaactcggactgtagatccagtatggaattaatgtgaaacttccagaaggcctttgttcttaggaaacacaccgaagtattggtggactggggggtgaagggacatcctgtgtgcaaattacttaccaatggttcaggaaaaaaatgtatataggtgtcttcttatgagtgtgtgtgttgtgtaagagagagtgagacagagaaagagtgagagagaaaattataaagtaaatgtggccatcaaggggagagagagggagtgaaggagggagggagagacaacagagagagagagagagagaaaagaaagagcacgaacttgggagttaagaagtgtgtcactgaaccccagacttctcgctttaccaactgtgtaccttgcggggatggggaagagggtagagaagttctccatgtaagtcttttaacttttctgcaagtccgaagttattcaaagattaaaataattgaggctgggcacagcagctcatgcccgtaatcccagcactttgagaggctgaggtgggcagatcacctgaggtcaggagctcaagaccaccctggccaacgtggtgaaaccccatctctactaaaaatacaaaaattagccaggtgtggtggtgcatggctgtaatcccagctactagggaggctgaggcaggagagtcacttgaacctgggaggcagaggtggcagtgagccgagatggtatcactgcactctagcttggacaacagagggagactctgtctcaaaaaaataaataggccgggcgtggtggctcacacctctaatcccagcactttgagagacggaggtgggcagatcgcttgaggtcaggagtttgagaccagcctggctaccatggtgaaaccccatctcaattacaaattcaaaaattagcccagcgaggtggtgggcgcctgtaatcccagctactcaggtggttgaggcaggagaattgctttaacacaagaggtaggggttccagtgagccaagattatgccactgcactccagcctgggtgacagagtgagactccgtctcaaataaataaataaataaaataaaataaaataaaaaatagagagaggggggagagagagagaatgacagggacaaatatagacaagtgtttggaggagttttcctgttaaaagaagggaaatgagatggtaactatagagtgaagtggggtcagggtagggtttattttatttacttatttttagggtttgttttaaagtggaaacaataacagcacttttacatgctggaggtgggcagggggtgggggctggaagagaatacaacccagagaatatgaaggatgcaggagagagagagggagagttaccagaggtaaggagggatggatgggttcctgtgcccaagtggcaggtgggcctttgccaggagcacggatggctcatccacagcaccagaggggaaggtagaggtggtggttacacgtggaggaggtgggtggatgtgtcctgggaactcacggaagtttcctctgattgtttctattcccctggggacatagaaagcaaggtagtcagctgaggttctttggaggttgaagaagaaagtgagaatcagctgtctggaaaatgtaagatctatacattagggaaacaggatgatttcacttctcaacactaagaggctcacctgagtcagtgattgcaaagttaacccccactataccaccagggtcccttggacccaaagttatagctgactaatccattcttcttcccaccccgagcccccattcatttccgtttctttttggagcaattctagatgtacatactgatatttcatgacctttgttcttttacaggtcttccaatgaaataaataagtttctttcttccccccctctcctcccccccgcttttttttttttgagatggagtctcactctgttgctcaggctgaaatgcagtggcacgatcttgactcactgcggcctctgcctccaggtttcaagagattctcccacctcagcctcccaagtggctgggtttacaggcatgcaccaccatgcccggctaatttttgtggttttaaggtgggaaattaaagaaaaataaaattaaaaagaaagagaaataaattttcatgtattaggccgacttgtcccagaggcagcaacgggcacagcccagacccaggaaaagtcttgataatattatctaatgtgctctggagactctctcagcaatccctcaacataaggagaagaaaaacaaattttcctttgttttatggaatgagtttatagattcctgttctctgtaactgtagggtccagccctactgggccttgcgggttgttctcttcgtgtgcagagacgagagacggtagaaaaatatgacacgagactaagagatagtaggaaagacagctgggcccagggggccactaccatcaatgcacggagtccagtagtggccccgaatgcctgaaggtgctgctatttattgtatacaaggcaagggggcagggtaaggagagtgagtcatcccaagtgattgataaggtcaagcaaatcacatgggggtcttctttgtggtagcagaagcagagagaggaccacatatgtcagcattttttctatgcacttatcagagagatcaaagactttaatactttcactaattctgctactgctatcttctaggaacttaaaagaggaaccaggtgtacaggcagaacatgaaagtggaaaggagcgtggccactgaagcacagcaccacagggaggggtttagtcctccagatgactgcgagcagggctggataatgtcagacctcccactagagctggtggagcagagtgttctctaacttcccccaaggaaagggaaactccctttcccggtccgctaagtaacgggtgccttcccaggcactggcgctaccgctagaccaaggtgtcctcaagcggcctttatcaggatgtgatagaggactttcactcttatcttctgctcacttctcacaatgtcccttcagctcctgactctgtattggctggtctttcctcggttataataataatacagagattaatactaaaaactaatgattgataatatccatatataatcatctctatatcctatttctttttctttttttttttttttttgacatggagtttcactctgtcgcccaggctggagtgcagtggcgtgatctcagctcactgcaagctccacctcctggattcataccattctctcgcctcagcctcctgagtagctgggactacaggcgcctgccaccatgcctagctaattttttgtttttgtatttttagtagagacagggtttcaccctgttagccaggatggtctcaatctcctgacctcgtgatccgcccaccttggcctcccaaagtgctgggagccactgcatccagctctatttcctacttctaatataacttttcttattctaactattttctttactatattggaacaggttgtgccctcagtctcttgcctcagcacctgggtaggtttccgcctacatgtaaccagtgacttcaaatattctgttttatctaagaagtacaacgaaggtcatgagaagcctgagtaggcctgaactacagctgcctgggcaccatagtgaaggttataggataagcccatgcccagacaaacctagataacggacatctgggttacttggcaacagtcatgtgcaatcctgtctttgtcctgcctctgtattgctgcttttcacaccactgtaagcttgcttcaagctagcccaccaccttctgtgaagtatgtataaaagtcagatgctgtctttgttccgggcccagtcttttggacgttgagtcagctgggcctgagtgcactcaataaagattctagtttcaacctgaggtctctctcgtcctcctgaatcctgcaacatttccagtagagacaggatttcaccatgttggccagactggcctcaaacgcctgacatcaagtgatctgcccacctctacctctcaaagtgctgggattacatgcgtgagccaccatgctctaccgttttcttccctttttaaacagaataaaactcattatgtcttgcaatgaccatatagatctattggtaggccctcttataacctgtcagcaccatccagccaaaggccaccaggaacacacctgtcatgacatgagttagctttgagggagaacgttttgcatgccacggggaactgtggggcaaataagtaagagggtgtcagggatggtttattacaggatttgggcatgtgttaggtggtttgaggagtcctttctctgggatgctctcaggaagtgggggtaattctatgattgaggatcttaacaaatttcaccaagaaggagggaagagtagaggaaggccaaagccgtaattggctaaagtagcagcagtcgatcctattagccaggacatggggtatggcctggctgtgaatcccagacccacttctggttctgcttttctctttccaaaaatccaagacatattgtgggatcttagcggtcttacttcttctgcatcttgaaatgatttgctatttcatcatcctgggaaatcttctgtagttaattcattgattcccaaaaatgacttaagagtcttcaagaggccaggcacggtggcttatgccttaatcccagcactttgggaggccgaggcgggcggatcatgaggtcaggagtttgagaccagcctggccaacatagtgaaactgtgtctctactaaaaatacaaaaattagccgggcatggtggtgcatgcctataatcccagctactcaggaggctgaggcaggagaatcgcttgaatctgagaggcggaggttgcagtgagaggattgtgccactgcactgcagcctgggtgacagattgagactctctcaaaaaaaaaaaaaaaaaaaaagaggtgtaagaattaaagaggaaagaaacatgaaaggggatgggcagtggggaagtggagtaacatgtaccacagagtaacagagggaggggtggtagaaggtgattggagagtgtgaccctggaagtggatggtggatggcgttatggcatcagcaatgacaagatctagacttagaccagggaagtgagtggctggggtacgtaaggcctaggtcaaggaactggggaactgggtgtcaactgatgacaggagttatgttggaaagtgagccaggagctaaaaccttcaaggaataagtaagtgttggcatgagtgtgactggccaccaggacagatgacagcaataaagggaggtagtgggcagtatgggtacaaggcacaatggaatgaggggtggggagaaccaacagagaaaggaaagcaatcaatgtccttagtggaggataaagcgaaagaagaaaggaggctgggaatagggaggacagcaggaaaatgagcaaggtttcaggaatcagacacgggataagagatgaagcttcttgtgcctgacccacacagagcagaaatgcagaacttcagggtcattctacagtgagtggcagatacatggaagacagctgcagcattagttctttgcactcactacctgggggatgtcacctctgtccaagtataatgcccagggggttctccttgcctgctgcctaaacagagctgattcatcagaacaggggaattgcaatagagaaagagtaatttggctgggtgcagtggctcacacctgtaatcccagcactttgggaggccaaggcaggtgaatcacctaaggtcaggagtttgagaccaacctggccaacacagtgaaaccctgtctgtactaaaaataccaaaaattagccgggcgtggtggcacgtgcctataatcccagctattggggaggctgaggcaggagaatcgcttgaacctgagaggcggaggatgctgtgagccaagatcctgccattgcactccagcctgggcaacgaaagtgaaactccatctcaaaaaagaaagagtaattcacgcagggctggctgtgtgggagaccggagttttattattacccaaatcagtctacccgagcatttggggagcagactttttaaggacaacttggtgggtagggggaagccagtgagcccaggagtgctgattggtcagggatgaaatcatagggagttgaagctgtctccttgtgctgattaagttcctgggtggggaccacaagatcacatgagccagttaatcagtctgggtggtgccagctgatccatcaagtgcagggtctgcaaaatatctcaagcactgatcttaggagcagtttagggagggtcagaatcttgtagcctccagctgcatgactcctaaagcataatttctaaactttttttttttgagacagagtctcactctgtcgcccaagctggagtgcagtggcaagatcctggctcactgcaacctccacgccgcctcccaggttcaagcgatcctcccacctcagcttcccaagtagctggcagtataggcatgtgccaccataaccggctaatttttgtattctttagtagagatggggtttcaccacgttggccaggctggtcttgaactcctgacctcaggtgatctacctgccgtggcctcccaaagtgctgggattacaggggtgagccacgaggcccagcccataatttctaatctcgtggctaatgttagtcctccaaaggcaacctagtccccaggcaagaaggaagtctgccttgggaaagggctgttaacatctttgttttaaactataaaataaaatataaactaagcttctcccaaagttagttcaggctatgctcaggaatgaataaggacaatttggaggttagaagcaagattgggtcggttaagttagatctctttcactgtctcagtcataattttgcaaaagcggtttcacaagcagtcaataccaggagcctctgaagaccaccatagcagtcctcagtgccaggcaaatccactaaaatagaaacaccaggctttgccaagaagggaaaacaaaaagaaaaacaaaacaactttatcgcacatttcattagaatttcagggacaggctgggtgtggtggctcacaactgtaatcccagcaatttgggaggcccaggtgggtagatcactttgaggccaggagatcaagaccagcctggccaatatgtcgaaacccatctctactataaatacaaaacattagccagacatggtggcacgcacctgtgatcctagatactccagaggctgaggcacaagaatcacttgaacctgggaggcagaggttgcagtgagttgagattgcatcactgcactccagcctgggtgagagagagagactcgaatttccatggacaggcattcatgttcaggagaaggggggtctgggcactggagttggaggaaagagcctcagtaaaggtacagaaacgttaagcacagggcaatcagaaaatgaggggaccggttcatacatctatgacccatccagccacctgggaaggtaggatctgggccttagcctgtcccagagaatgcagtaatgccctgtcccagagaatgcaggctccacgtgggctccttcctactgtaattgcccccattacacccacatccatcccctcacagactggtttatgtgccagactcagccagcgggtggagcttctcccgggaagccacacctccacctccccaacacgcagcaccccagcctcgctctgacaggctcttccttacatcatggcagtttttcatcagggaaccactgtctccacaagccaaatgctgttgtaggccaatcagactctgaaatccatgcacctttgttagcaggtcatcgtggaggatgcacccatcgaaggtggccttccacccccgtcctataaaaagaaggccacttcagcaaatagaataaagagtctgacaatgtctttttttttttttttttttttttaactttcttgttatggaccaatcagtaaccatgatcacgaccacatttgagaatcagggctctttgcagctggggcaatacttctggatcgggagcaacttatcatggaggacctggtattagaggacacgttgacaacatagaataatacaggcaagtacgatcaaggcattaaaagtcctcacatcaagatggacatggccttctcccagtccattccacatacagcatttatttggccggcactgctgtctatttcttcaagaatgcattttctcctaatcattccatttcaaacagagccacggctttaaatgcttaggttaatttcaaaagaggtgagtccctttcagcatctcatggggcatactgtatctcctttctttctttctgttttattttattttattttatttttttgagacagagtttcactctcgttgcccaggctggagtgcaatggcgcgatctcagctcaccgcaacctctgcctcctgagttcaagcgattctcctgcctcagcctcctgagtagctgggattacaggcatgtgccaccacgcctggctaattttgtatttttagtagagacagggtttctccattttggtcaggctggtctcaaactcctgacctcaggtgatccacctgcttcagcctcccaaggtgctgggattacaggcgtgagccaccgcacccggcctgtatctcctttcaaaaagagctgctgtccttgtccactttgggaagccaaggagggcggatcacctgaggacaggagttctaggccagcctggccaacatggtgaaacactgtctctactaaaaatacaaaaattaatttacaatgagctgatggacccacccggggtcaagacagtgaccaagcgaaatgggcgtgggcgtcacgaggtgtctgcggaaggaagttggaggagagtggtccgagctcttttgaggaaagccattactgtgaagagcggagcttcagcggtctggctgggtcggaggcgaaagcggagcccatgagccccctctcccccactggggggggacttcccggggccgcagagagaagtccgactgcgactgcgagatcgcgccctgagggggctgccgccctgggagtcacagccccgcccctctccctgccctgtcagtggggactggggacaaactacttaaccttcggactctcagtttccccagctgggaagtggaaacaccactgcctacctcgtggggtggagggagcagaaacggagccgagggcgcgaccgcggctcagtagtctggaatgtgggtcccagtatccgactagcttcccccgaaggggtcttggctgtgataccgaagcacctgagcaactgcgttgcctgcggacaatacaataggaagcatttactgtttggcctaggctgtgtgctaagtgctctcgtcattacaaactcgcaaaggttacctacagaaggaaaccttgagatggaggttaagcagcttaggcaacagagcaagacccagtttctaccaaaaaaaaaaatttttttttaattattattattattttttttaaacggagactcgctctgttgccaaggctagagtgctggagtgcaatggcacaatcttggcgcactgcaacctccacctccaaggttcggggtagtctcctgcctcagccccccgagtagctgggattagatcttttagcaagttgggcagatgactcatgcctgtaatcccagcactttgggaggccgaggcaggtggatcacctgagatcgggagttcgagaccagcctgacaccaacatggagaaaccccgtctctactaaaaatacaaaattagccaggtgtggtggcgcatgcctataatcccagctactagggaggctgaggcaggagaatcgcttgaacaccccttctctggtctcatggaaaaatggtttggaaatggaagggactcatgacctcaatctttacctcccttgcaattattaccagtgtactcattcttgtaggttgtgtcataccttgcatttgtggatttgtgcaaaggcttatagaaacagctcttaccaaacccctctccattctcccccaccctactcagataaactcctacttctagaaaccaagaggagcaacaaagccaaaatatattagaggaatttgaagaggaagaactataaagtcaggagggggaaaattgccagaaacagtaagttcctcttcaaagtttccttggtctttcttgctctatacgcagcccttcctgcttaatcaggaaggagcacttgtttctctgtttaatgggtaactagcaaacctcttacttggtaaacaacccttcccgcctagttggtaatggacagcctctcccttcctgcctaattggccttattcaatttcaagcactagtcaattgggtcagcttagactgtgctgtccaactccagcaaatggggaaaggacacagaaacagaaactgtgttagggataaaaacccctgctctacccggcttgatgtgctcttgggatcagtcagacgcaagctgtacccttctgcagaagtaaatgtgccttgctgagaaattctttgtttaagtggtggtttttctttgcagcactgaacacttgtttctaacacctggggggcagaggttgtggtgagccgagatcttgccattgccctccagcctggcgccatggctcacatgggaggctgagacaggcagatcacttgagcacagaagttcgagatcagcctgggcaacattggcaaaaccctgtctctacaaaaaatacaaaaactagctgggcatggtggttcaggcttgtcatcccagctacttgtgaggctgaggtgggaggataacttgagtccagtaggcagaggttacagtgagctgggatcatgccattgcattccagcctgggtgacagccagactctgtctcaaaaaagaaaaagaaaaagaaaaaaaagtggtggaatctcttacaccagtaagggggtgtacctttttgcatgcttaagatcttctattttcttttctatgagctgactgctcagatcctttccccattggcctttttgaattgttgatcctttgtatttgcatccctaacctacttgttctagtctatgatttcagttacacatccaacttttgtttttttaagatggctaaccagttgcctcagcatcatatatggagcagcccaccttttcatcagtctgagatgccacttttatcatataataaaggcctcatatatacttaggtctatttctgaaactttcttttaaacaaaagagccttctggtatcatggctgttttttaaacttttgattgattgtgtacctacctttgtatacctacctttgtgtacctgtgaacgtggccttgtccgtgtggttagcaaggagcatgtgttccattcctcctctggctgcccttcaacaccatccactgctcacaatgctgccagggaagcctgggcacctccagaggtgccaacctgaccatgccaaggctgccaactccaggtgcttctaaggttttcagtccttgggcaccaggaggctgccaggtttcctgccagctgaggagagcagcctattcaactattcaacctatgcaactccaggtcctgctatttctgtttttcttggccctgattgcacttcagttttcgccctgtcttctggaatggctccttcaaattccccttttcatcacatcagttttcacaggtagttgaagagatctgcttggagagagataccatttgtttccctattttcctttgcctcctctctgactccttccaccacccctgccccctgcccagccccaccattcttttctctcccgcctgggcctcttcacagttaccaaccaaaaactttcacttatagcaacagaaacagaactgtgccaatctgtgtggccttggtgggggaagggagattgtttggctgcagcagccagcaaagttagtgttccatatggctcctttttttgtttctgttttttttttgggggggggcggaatttcgctcttgttccccaggctggagtgcaatggcatgatctcggctcaccacaaccttcgcctcctgagttcaagcgattctcctgcctcagcctccctagtagctgggattacaggcatgtgccaccacgcctggctaattttgtatttttagtagagacgaggtttctccatgttggtcaggctggtctcgaactcccgacctcatgtgatctgcctgcctcggcctcccaaagtgctgggattacaggcatgagccactgcacctggctgtttttttgtttttttgatacacagtctcactttgccatcctggctggaatgcagtgaagagatcacggctcactgcagccttgacctcccaggctcaagcaatcctcctgcctcatcctcccaagtagctgggaccacaggcgcgcatcaccacaactggctaattttttttgagacgaagtcttgctctgtcacccaggctggagtgcagtgacacaatctcagctcactgcaacctctgcctctcgggttcaagcgattctcttgcctcaacctcccaagtagctggcactacaggtgtgcgtgtccaggtaatttttgtgtttttagtagagacagggtttcaccatgttggccaggctagtcttgaactcctgacctcaagtgatccacctgccttggccttccaaaattctgggattacaagtgtgagccaccacgcccagccacctggctaatttttgttaattttttttttttttttggtagagatgaggtctacctatgttgccatgggtggtctcaaactcctcctcaagcgatcctcccccctcggcctcccaaagtgctgggattgcaggcatgagccattgcgccaagcccatatgcccctttaaaaaaaagatatttagtagaaatggagcatcttgctacagtcttgctgctcacagtgtggtccccaaaccagcaccattgatatcatctgggggtgggttagaagtgcagaatcactggctccagacctattgcgtcagaacctgcatgttaacaaggttcccccagaatgcacatgcacatcagagtttgggaagcattctgctctgggacttgatgactgaaggagggaggctgagggagagagaagaagcaaatatgttttttgagacctcaattctcactaccaatatctgaaacttggggaccacatggatttggataacaagtgatacagttataactccagatgtctacgctggtggctgagtgggtcttagaacactttctggggttataaaatacagaatcagcaagttgaggcagaaaggcctgaagggagatggcaaatccgtgtgagcaaggctaagtctaaagacccatgggccaggggtgcttactgagaacagagtacgtggcaccattaggggcagaggatggaagcaagcacatatgaaactaggcatggtggcatgctcctgtagtcccagctactcaggaggctgaggtggagggtcacttgagctggggaggtcgaggttgtgagccatggtcatgccactgccctccaccacgggccacagagcgagacttgaaaaaaaaaagaaagagagagagagggagagagagagagagagagagagggagagagagagagagggagagagagaaagaaagaaaaaaagaaagaaaaagaaaaagagaaaaagaaagagaaagagagaaagagttgaaaatcttggaggcctttgaaaacatagagagactggacttctgtttctatgatcagggtgaggtatacaggtggtccccagtagccatggactgggagagatgacacggagatactactttgtgtaagagaagagtacatgtttcagaatcacaggaacaccaatgtgtaatgagcaggcaggccgagagaaatgacaacgtatgtccttataaagacttagaggcaaatgtttagagcagaattattcgaatagctttgaactgaaaactactcaaacgtccatcagtgggtgaacggataaacaaaatgtgatattcaggaataaaaacataatggtacaacataatggcacatgtcacaatggggatgaacctcagaaacattatgctcagagaaagacatcagtcagacacaaaagaccacatactgtgtaattcctttcatatgaaatgccaggaacgggaactctagacataaagtagatcagtggttaactcaagatgagggtgggagtgggcaatgactgtgtaggggaggcaaaactttatctccttagggtccttgctgggcctgagactcaaactgacatagattagcaggaggaaagctatcataaaagctgtcaatgtaagttttacatgacacgggagccctcacaaggaaatgaaaacccaaggccacgatcatatatgtgcatttgttctggttattttctgcctccccttccacttgccattcttctctcccctgctcttttgtactgcatagagctgcataagggtcgtgagccaaacagcactccctcttgctgcagctggtcacagggctgcccctgctactcatcctgtgcctcatgggcaacatgttatgcccatgtccaaggtacagagaagtggacccagagccagggagaggtgatagggacctttgggcggggtgggaggtgcttattgagaacagagtccatgtcaccattagggagagagcatggaagcaagcacgtttgacaatcctgtgtctgccctgtttctggagaggcagatgcagacagcaggtcagagggaatttgactggacaggaacttggggggttgagggtagccattgcatataaccaaacctgttacacatttctttgatatctgatgtcattgtgacatgatctagaaacctctgtcaaaatagttcctaatgatactaaacaacaactgagactgtttattgagtttgtgaaatcaaggagtggctgctcttctagaagcagtgagttgatgtctgttctaacattgttctgagacaaggaaacctttttatactttaatagccagggtcagaatttctcagattgtatatttgcatgtagcacaggagatgctcttttaataaaaatccagaaatttgttgtgcacattattcaatagagaacaatatcaaattaaaccaacaacaatgacacttaacatttgcccaaagcttggtaaatgttgatggtcactgtgtaccttcagatagctgtgtactctaacagagagaatgatttcaaaatcagttgaagagaaaacgcctctgcctgcctgtacctgtatattactgtcaatgtcaatcaggaatgtgtgggttcattccagttattttccggctcccaatctacttgccattctttcatctcctgctcttttgtactgcatagagctacagaaagttagtgagtcaaacgacagcccctcttggtgcatttggtcacaaggctgcccctggtactcaaccagtgcctcctgtcctctcccctccaaatcccccctccttctcagctatcaactctgttaatcctggtggtttccctggctaccgtgacccaaactctcattcctgaaaagtctaaacccctcaaggccacatctttctcaagtcagggttcctgcacttgtccattcatgtcacaggtggacctgggagtaacacgtggcacccaaacagatcaccagagttcacatatattccacctgccctccctgcataagagcactactccctcttcctgatgatggttcagggccattaatccctgccaagatggtgactgctcctgcctgctagttcaacctgtccagccacagctgtagcttgaaggcttgaagttcaatgggacccacttctgcttccacgctttctttcctttaattttaatttttatttatttgagacagggtctggctctgtcaccaaggctggagtgcagtggtgcaatcacggctcactggagcatccacctcccagactcaactgatcctcctgcctcagcctctgaaatagctgttgtacagatattcgtcaccctgaacagggcttcactaccttgcctaggctgtttcttttgtgctttgtttgttcgttcgtttgtttcgagatggggctctggctttgccgcctaggctggagtgtaatggcgtgatctcacctcactgtggcctcctgggctcaagccatcctcccacctgggcctcccaaagtgctgggattacaggcatgagccacagtgcccggactgaagatatcctttagagaaagaagcagcgggtagttttgccaaggccagacaagatttctggagtttggaaagggtgagagattgggtcagcaaaagacacattctgatctttatgctgggatgcaatttatagatacagggatgagacccaaaaaagctgggagagatttgtcatcatggttgcaaggcaactgccggtggctgatcccgtaaaggatacacatacctagaacagagcctaaaaaagcatcaagcatgaagggtggagccacgatgcttggactcgagttctgctcctgtgcattcctcggtaacttaaactacctgtgcctcgatttttcctggggaaaaaaggaagtttgtagccagtacattggtgcctgccttaaagtagaactactccatgggctgaagaggaagttcagctgggcgtagtggctcacacctgtaatcccagcaatctgggaggcccaggcaggtggatcacctgaggtcaggagttcgagaccagcctggtcaacatggtgaaaccccgtttctactaaaaatacaaaaattagctgggcatggtggcgggtgcctgtaatcccagatactcgggaggctgaggcaggagcattgcctgaactcgggaggcagaggttgcagtgagccgagatggtgccgttgcactccagcctgggtaccaagagctaaactccatctcaaaaacaaaaaacaaacaaacaaacagagtaagttgaagtccagcctgggcaacacaccactggaatccatccctttgaaaggtcatcacccctccacagccaagctgagatttaaagccctccaagtaaagtcgaacatgttccctacttggaaatgaatattcttgttttgggtcctaggatactctccataaatcatgaaccttatgatacttaaaggagtaagaaaacctaccaactatcctaaactacccggcgcagtcttttctttctaaccttgcaaacaggttgtatcccaggagagggagccccattcctggaggtactgcaataccaggtcgacgcgtggagtggacagagcaagctcctatttcatctccctgctccaaaaatctatctaatataattgttctctgatagaggacgtatcagatattaaactgataagaacagatactacacttgatcttagccaaaaggacgagaagagatgtcgtcgccttcctccctgccatcaccgtcccactctcatctacattcaagacgcggtgagagccccagcctcgctccttgcctcattcactttgtcttgtccacaccaatattgacgccattacacactcgggctgatttcttattctccacgttttaaaagaaaaatctgccgggcgcagtggctcacgccagtaatcctaacactttgggaggccgaggcgggtggatcacaaggtcaggagatcaagaccattctggcaaacacggagaaatcccgtctcgactcaggagctcgagaccagcctggggaacacggtgaaaccccatctctactaaaaatacaaaaaaattagccgggcgtgccgggcgcggtgactcacgcctgtaatcccagcactttaggaggccgaggcaggtggatcacgaggtcaggagatcgagaccattctggataacacggagaaaccccgtctctattaaaaatacaaaaattagccgggcgtggtggcacgtgcctgtagtcccagctacttgggaggctgatgcaggagaatctcttgaacctgggagtccgaggttgcagtgagccaagattgcgctactacactccagcctgggcgacagagtgagactccatctaaaaaaaaaacaaaaacaaaaaaacaaaaattagtcaggcgtggtgtcgcgcgcctgtaatcccagctactagggaggctgggcagtagaatcacttgaacccgggaggcggaggttgcagtgaaccgagatcgcgccactgcactccagcttgggcgacagagcgagactctgtctcaaaacaacaacaaaacaacaacaacaacacaaaaaccaagagaaatcttacaccagttctagttccggggtttccgggctttcatttcgaatttgcatgccctgccctttcccaggaggcgtggccaccgcggttgactccacccccgggcccgcctccagctaaggagccgcggctgggctaggggcgacttccttgtttgtatgagcgaaaagactgaaccaaaagagacagggggtgaaaacaagataggtctgtggaagagacctgtaggcggagagcggtccctgttttcctggagaaagacgagtcgcaagatatcatcaccaggggaaaccaggctgagctggatctttacgtcgtcaccagtgggcggggagaccagccttgtacccactggacagcgggcccattccgagtcagggaagcagaaggcctggaggagcttcggggagcaggggctggagttcctctgccaggcaggaggctgacaccagacaccgggcagagggaggcggcgcatggacggcgagggcccagcaaggattctccccagcccctgtgcctgcgtctcctgcggcttctgtgcgcggaccgtgtcctgtgctgtgtagggaaagctgcttctctgcttgggacgtggattcctttaccctcctcctcgcctgactacttctgacgcgggtcgtcaggactccgcttgggtgtcacccgtccaggaagcctcccttaattaagggccctcggcacccaccccatatgtgattagcagccctcctgtgtatttcatcgcacctcgttgtttatatcaactactccactcaccacccttctgggcagtcctttatctccccctctgaaatccgatcgctgagggctgggaccctcatcagtacttatccccgtttctctgcgctagtctaattagtgcctggcaagttgaaggcgctcagtaaacgtttgtggagcgaagaaacgacggatagggcgtaatgagcacgacacacgcaatcagagaggacgcagttaggaggctattggcccggggcaggcgtgaagggggaagatcgggctcggggtgggaggacaccagagggcggggtgactgtcggggtgctctggaggaagatgggcgtcaaggcccccagcaaggttgggataaattttctctctgaggcacagactgccgcctgtagcgtcagcatttaccattcccgtcctccttcctaacacaacagttgagatgagagtttatggctcttttatttgatttcagaaaagcaagaaggtatcatagatccgatagtgacactcagtcagtcatgctccccctgcaggatggaaagccggatggcagggattgcctggtgaacaaccaggtcaaaaaatataaactgtgcctttcccaatgccagcctcgggtccgagggctctacgtgcattatctcttttagttcactcgacagccctaagagatgggcgttattattagccacggccaggattagggtgaggtcattcctctaggttcgaatttcagggggtgatcctccagaacccttcagtaatcaaaataaataatagttcaatgcaatatatcttatctcgattataagataatcaagccatttatctggattgctgagtcttttggtgcccccttatttttttttttaacctctcagcaagtgtttccctcatttcactttaccccagtctccaccgagtcattgtcatctccattctattaccctgtgaagtgcaatatggcagccacccacctcggcctcccaaagtgctgagattataggcgtgagccactgcgcctggcctgtctgtctgtctgtctatctatctatctatctatctatctatctgttcttttttctgagacggagtctcgcactgtcgcccgggctggagtgcagtggcgctatctcagctcactgcaacctccgcctcccgtgtttaagcgactctcctgcgtcagcctcccaagtagctgggactacaggtgcgtgccaccacaccggactgattttttgtatttttagtagagacggggtttcaccgtgttagccaggatggtctccatctcctaacctcgtgatccgcgtgcctcggcctcccaaagtgctgggattacaggcatgatccaccgcgcctggccatatctatctatattttgagacaaggtttccctctgttgtccaggctggagtgcagtgttacaatcacggttcactcaccatacaccaagataaatgccaagtgggccaaagatttcaaagtgaaaaaaatggaactataaaagtatataagggccaaggccaggcgcggtggctcacgcctgtaatcccagcactttggaaggccgaggagggcagattacgacgtcaggagtcagagaccagcctggccaatgtagtgaaaccccatctctactaaaaataaaattagctgggtgtgatggcacgcactcgtagttccagctactcagggggctgaggcgggagaatcgcttgaactcggaggtggaggttgcagtgagccaagaccatgccactgccctccagcctgggtgacagagtgcgactctgtctcaaaaaaaaaaaaaagtatatgagggccaagcacggtggttcatgcctgtaattccagcactttgggaggccaaggtgggcagattgcttgagcccaagagtttgagaccagcctgggcaatatagcaagacctcgtctctacaaataatttttaaaaataaaaataaaaattgtaaaaaaaaagaccaaaaaaaaaagtatagaggacaccaggggtggtggctcatgcctgtaatcccaacactttgggagggcaaggtgggaagatcacttgagcccagcaattcaagaccagcctgaacaacacagggataccctgtctctacaaaatactaataataggccgggcatggtggctcatgcctgtaatcccagcactttgggaggctgaggtgggcggagcacctgaggtcgggagttcgagaccagcctgaccaacgtggagaaaccccatctctactaaaaatacaaaattagccaagtgtggtggcgcatgcctgtaatcccagctactggggaggccgaggcaggagaattgcttgacccaaggaggcggaggttgtggtgaggcgagatggtgccattgcactccagcctgggcaacaagagcaaaactgtctcaaaaaaaaaaaaaaaaaaaataggctgggcactgtggctcacgcctgtaatcccagcactttgggaagccgaggccgaggtgggcggatcacgaagtcaagagatcgagaccatcctggtcaacatggtgaaaccctgtctctactaaaaatacagaaattagctgggcgtggtggtgcgtgcctgtagtcccagctgcttgggaggctgaggcaggagaatcgcttgaacctgggaggtggaggttgcagggagccgaggtggtaccattgcactccagcctgggtgacagagcgagactccatctcaaaaataaaataaataaataaataaataaaataaatagtaataataaataaaaattagccaggcatggtggtgtgcatctgtggtcttagctacttaggcaggctgaggcgggagcatcacttgagcccaggaggttgagaccagcctgagcaacatagtgagacaccatcactattaaaaggaaaaaatgtagtaaaatatgaagcttttttctttcttcttccctctctctccacttgtcaccatgtttttcactttctatttcatgatcacactcctcaggcacaggacagaggtaggagagtgcagactcttgcaggagtccagaggccctctgtcccacaacttaggatggtccctgtgacctcaaaactcactagtcaagtaggaggtctgagctcccagtggagtaaccagccatccagtttgctaggggattaggggtttcctggaatatgggactttgagaactaaaactggcaaagttccaggtgatcagggagagttggttaccctagagctctgagctgtgccagacctcagagtgggctccaaattttgggggaaatgagaacaaccatcctgatatagttcacaggtggctttccccaagggtggcacatgctgaaaggatgcagtcagggggatgcagctggtcttcggtggtctccggagcccacagggaggcagaggagcccccccaccccacgaactataggcttattgcctttcgcacaccaagtcccaagagcccataacacctctttcgaccatcaaggccctcattctgctcctcaggaagtcctggcacccaggccatgaaatctggctttgagactgacattcttgctgagactggggtattctccttttacccatatctaagagcctgtgagtttccttttgtgtccaataagggctaatcctgggtggtctatgactgcctgtctgcaaggtcacagaaggacgtgacctccatctgctgttgctttcctgatggctcccttggtctcctgcaagttctccaatgccagcttagtccttgttcaactctacgttttctggagagaacccttcttggcactgtcacctctgttgagataactctcctccaaatctccagcccccttctctagccacccctagacattcttcttgggaacccccatccccaggctgtccgaattccctctggcctctcagtccttggatgctgagggccactcccttttacttcctcaagttcttactttccttggcttcaggcacttgcagctttgtggccttttaaagtcctatggttttccttctacctctccagatgctgcttctccatctttcacttcatttccctgccttgaatgtggagatgctcatgacagtgttatggaaccactttcctcctctcaccccattgctccctggggaattccacccatctcaggactcttttctcactgaccacccaaggccactcctccaactaaggcctcccctgagctccaggctcctgagcaaatggactctggacatttgtccccacatggatagcctgcagacattacaccatggctgcaactgaactcttgaaaaccttcccaaggccgagcacggtggctcttgcctgtaatcccagcactttgagaggccgaggcaggtagattgcttgagccaagtttgagaccagcctgagcaacgtggtgaaaccccgtctctactaaaaataccaaaattagccgggcatggtggcacacgcctgtaatcccagctactcgggaggctgaggcaggagaatcgcttgaacccgggatgtggaggttgcagtgagccaagatcatgccctccagcctgggcgaaagagcaagactccacctcaaaaaaaaaaaaaattagctgggtattgtggtgggagcctgtaagtcccagctactcaggaggctgaggtgggaggatcactgaagcccaggatatagaggttgcagtgagctgagatcacaccattgcactccagcctaggtcatagagtaagaccctctctaggaaaaaaaaaaaaaatcttccccaccctgcagccctctcctgcctgcctcagtgttccctggacctattagaccctctgtaaatacatggaaaatgtcatcaaaattagagtttctgctcaaatagtgttcattttaatttggtatctcacacacactaaaaacttgaagagggtgtattttctacctccaacctgaaactgtaggaaaggccctgtctgaaaggagacttcgggagctgacaaaggaacctgaataacttcatccactaagactccgcttttcttcaccaatcaggcggtgacaaatacatccaccagggggcagcatctacttatttctagcccctggctccaccctaggccttgattttggggtggttgccagggaaagagttcctggttggggagaagggtatctttggggccctttcgcacatttttgccccacactcatacttagcgataggttgggttttctcaattttgttcatgaggaaacagaactgggatttgaaaaatgggccttcgtgattgccgagctggtaactgctccgtggcgtccattcccccaccccaccccctactcctgcagactcctctttccctcgtttgttcacgaagacaagtacttggttaagatgctgcagagacaaggatgttctcagccacttcctagaagagctccacccatcctcctaccctcccttacttcagagcatgggctgttatggggaaacgacctggagacatctaaagcccctcattacaggatgaggaaaccgaggctcccaggtggggaagttacttttttttgagacggagtctcgctctgtcgcccaggctggagtgcagtggcgcaattcggctcactgcaacctccgccttcccggttccagctattctcctgcttcagcctccggagtagctgggactacaggcgtgcgccaccacgccctgctaatttttttgtatttttagtagagacgaggtttcaacatgttggccaggctggtcttgaactcctaacttcaggtgatccatccgcctcagccacccaaagtgttggcattataggcgcgagccactgggcccggccggaagtggctttttactttttcaagtcactctactagtgaggaatggaaggatgggactcacgcactgaatctcagtctggtgttccagcatgtcctaagggcaacctgtctctccagtgtcatccccatttttggtccttgtttttctcctttaagttcctcctctccaataaaggcctgagagttctatactactcagacactgcctagaaatgcagggtttgtaggaattcctggccaacccagtatcaacagaacccccaagggcccaagggcccaaggaccccaggctgggaaactcccacgctaagggtggaggtttggttctcctactcagggagccctctgagtacatttattccatcatgcattcattaattcacacaagattttctgactgcctatgtgtgccaggcatggtgctgggcatggtagagctacagataagaaccagctgctgcccttgatcacgtagtctggtggaggagacagctctgaggaagaatgatgcttatctgactcagtgtcacttaaaccttggctcagcgtcgccgctttgaaactttctcctgcacactcttccaccaatctaaagtagttctccagccacatgtggtggcacgcacctgtaatcccagctactcaggagtctgaggcggaggatctcttgaaccgaagagttcaaggctgcagtaagctatggtctcgccactgcactccagcctgggtgacagagtgagaccttgtctttaaaaaaaaaaaaaaaaggccgggcgcggtggctcatgcctgtaatcccggcactttgggaggccgaggcgggcggatcacgaggtcaggagattgagaccatcttggctaacacggtgaaactccgtctctactaaaaatactaaaaattagctgggcgcggtggcgggcacctgtagttccagctactcgggaggctgaggcaggagaatggcatgaacccgggaagtggagcttgcagtgagccgagatagcgccactgcagtccgccctgggcaaaacagcgagactccgtctcaaaaaaaaaaaaaattatttttattttaattttgaaaaaatagggaatgcttcatgaatttgcaagtcatccttgcacggggccatgctaatttctgtatcgttcaaaaaaaaatgattgcttaatgtacaaatgttcagatgttctctgcagggattagtgtaagcccatagcttagtgctacctggacgagctgggcccctttttttacccctccccagccccaccttctccttcccatttgttcattaacaccttctctggcaaacatgaaagacggaagggtggggtaggattgtcagtttcatttcctttatcagataagtgacaatttctgtcttggatgtgagtcccaagacagattataggagccatgttaaagaagcttcaaagattgtggaagaaacaagacaacttgtgtattttcagtttttgtgtgttttcagtctcatagccattgtaacatttgttcaaagccaggtttggccagtttctagctggatgaccttcaacaaattacctaacctttctgtgcttcagtttcttctttttagactaaccatacttacttcatgggcttgacttgtgtattaaaaaaggaaaagtaagcaaagttcctagaccagagcctggcatgcagtggccactcaacagtgcagtggttctcaaccgctgggcctgctccgtcttcccctctcctaacttcaccatgctcaggtctgtctcctgtacgttagctgctgctgcaacctgtcaccctccaacttggggtgtaacaaactaatttcctaaggtcttaatcttagactaatttcctaaggtctttagggatttggggaggctccctgcattgctggggaaaccaggtggctggttttgtagtggaggggagaaaaaggaggtggcaaagcacactggtgacaaacagatgggaagcttatttatcagcacttgattgaggagggtgggcaggaaaaggctgggccgtgctgtctggcaatgacttcccttctcctttttccaatccctctcacacatagcccttaaaaagattaatactgaattacacaataaataaaataatccacgcctgtaaatcccaacactttgggaggtcgaggcgggcggatcacctgagatcgggagttcgagaccagcctgaccaacatggagaaatcctgtctgtactaaaagtacaaaattagccgggcgtggtggcacatgcctataatcccagctactcgggaggctgaggcaggagaattgcttgaacctgggaggtggaggttgcagtgagccgagatcgcaccattggacaccagcctgggtaacaagagcaaaactctgtctcaaaaataaataaataaataaataaataaataaatagataaagttacaatttacaatttcattcttctttgattggccctcttctctcccccacctaattgctgttgtccttttggtcacactgccctttgtgacatctccttcctttcagggctgcccagactgtagcaggctgcagtggctggggagaccctactcattcctgtgcccctcctaaccagtcctagatagggctaaagaacgtctataaaccttttcagaagcttccagttgacacattctctctcttctctgaaatcctacaagtgctatctcatgatttacaaagacccaatacatgtgctgtctcattctgtcattgccagtcttaagtcttaagccctttgaggcctgattctacagccgagacatcctctatttctccaccatctctctgtctcattcagagcacacagtatgaatgaggtcaataaacacagtgttttttgttttgttttgttttgtttttgttttttttgagacagagtcttgctctgttgcccaggctggagtgcaatggtgtgatctcagctcactgcaacctccgcctcccgggttcaagtgattctcctgcctcagcctcccgaatagttgcaattacaggcgcccgccaccacacccagctaatttttgtatttttagtagagacggggtttcaccatgttggccaggctggtctcgaactcctgacctcaggtgcttcgcccacatcggcctcccaaaatgctggtattacaggcgtgagctaccgtgcccagcccaataaacacactggttttttttttttgtttgctttgttttgagacagagtcttgctctgtcgcccaggctggaatgcagtggcgctatctcagcttactgcaacctccgcctcccgggttcaagcgattctcctgcctcagcctcccgagtagctgggattacaggcacccgccaccacgcccggctaatttttgtctttttattactgatggggtttcaccctgttgtccaggctggtggaactcctgagcttaagtgatgtgcctgcctcagcctcccaaagtgctgagtttacaggtatgatccactgcgcctaaacatactgttgagtgtaacctcaaataggtcatttaacccttcagggctttgtgtatctgtaaaaggcagacaacagtccctaacaggctattgcagataatgggcttagcactatgaagcagctgttttatggggctccaggttcaccttaggtttgacaattgaattatgaaagataaaggagaaagacttgtcagcctctccgagtagatcctttggccgaaggagtgtccatgtggggtggtatctcggcctggtggagggggatgcgatggtagtgagaatattagggtattcatatctttcctcccgagtcaaacgttgccaggcacgttcctttcgcccctcccaccctccattctgcattaattccaagtttaattccaaatattagagtgtggtagaaaaggtcaaatagagcagccacggattaagcaaacgcccctccgcgtatggtgggggctgcagcgcccgtagctccacgctccgccccgccgccgctgattgtcccgcgccttgtgacgtcacacgcgggtttttaaggccgaaccctaggcaggctctgcagaggcagcggttggaggcgcggtgggtgtctgcgggggtctcgcggggcggctgcggtgtttcaccgggaaaggctcgaggagagcgcggctcacgagaggtaaacggaccctgcagaccgtgctgaggcggtcccggtgccgggccgctggagctggggtcggccatcggaggagggcgggcgggcaggagagtgtcgcggggcggtggggcgagggtcgcggagtaaggaagggcaccgtgtcaacggcttggggctgcggagggcgggtgggagccggactcaatctccggtctcagcgtctgcaccctagctcttagtttgggggcactgtcgacttcccccgtccctcggggatcttgcctgggggatggcgccataagctctgagaagaggctctagaagcccactgtccatggatcgagccctcaccccccacttgagtggcccaggacctgggagtctctctaggtcccatcgcccccctcacgacccccccagggagtgggggaacacctctgttatgccttaaaaaaaaaaaaaaaaaggaaaggaattttaaaaatgaaggatgggagggtgatttaggaagggatcaagaagttgcaaatcttgtgtgtattattaaacgtctcctttttctcccatgaccttttcttggttcagataacccagctgtgctccctggaaccttcaatttcaaggcctccctgcctctactaggcgccttagctcactatggggaaccacttgactgagatggcgcccactgcctcctccttcttgccccacttccaagccctgcatgtcgtggtcattgggctggactctgctggaaagacctccctcctttaccgcctcaagttcaaggagtttgtccagagtgtccccaccaaaggcttcaacaccgagaagatccgggtgcccctcgggggatcgcgtggcatcaccttccaagtgtgggacgtcggggggcaggagaagctgcgaccactgtggcgctcttatacccgccggacagacggtctagtgtttgtggtggacgctgcggaggctgagcggctggaggaagccaaggtggagttgcaccgaatcagccgggcctcggacaaccagggcgtgccagtgctggtgctggccaacaagcaggaccagcccggggcactgagcgctgctgaggtggagaagaggctggcagtccgagagctagcagccgccactctcactcatgtgcaaggctgcagcgctgtggacggtctgggcctgcagcagggccttgagcgcctctatgagatgatcctcaagaggaagaaggcagctcggggtggcaagaagagacggtgacccaagccccccctccctttcctcccacctagtaggggtctgcacacttggacagcagggtgggaccagcctgtgacctctcagtcagactggggtgcaggacctgtccacctcaatgaaggagagaggagcatggggtgtcccgttttggtgccacactggggtggggatgggagatgggatgtctttgcatatctctctcatcctctctggagaagtgggcgctgcaggactgtggagacgtaaatgtaaactgtgactctacctcgaccctgtttcttatttttcttctctggctaaaaatttttaattggatgtgtttgggggcggggggatggaagtgacttggagaatgtgtttgggatgaaataactatctccccttcctctgtcccccaactggggagtctccccaggctgcttttctaggaataccagtcacatagtttttatttttgtgtctgtgaaagtgccaagaacccctccccacatttgtagatccatgaccctttttataagctgtgtgtgtcctctgtattattgttattaactattttttagcatttgcctgtaagttattaaagactgataactgtagctcttaccttggtctggggcattttcctctccttatcttgccccagagacaattcaagatttctatatggggttgtggcgcagggggagggagatttatcttgaagctgaatttgcaaagcaagcacttataaaaattagattgtgtgttacgggatggcttgtgaaaattataggggggagtggaaaacccctcaagctattgcctgatctctgtagttttttgggtggggtcacttcctttttctctgatttaacacccctcccctcatcctctgggtcttacttgtcccttatatcaactgctccttgcagatttaacttcaaattttgctagtctgagctactcctaggttcttgaccttggtgacacctaagtctatataggtaagtcctcaaagagccattctgttcccatcctccccacttccccagtcttaggttggtttgatttttttcctccttgtaagatgtggtgagagtggaaagtaattcctccctggccttaagtcacctctgtgtactcaatcctgctgactggctcactggcatgatggcagcggctggtgctagggaggcctgggctggattgagccagcctggccctggtgactaagccatgagttttccagctctgggaatggtagctcttctcacgagaggggcagaagtagtagctgtttgtgcttggtggcagagaggactgctggacatacaccctccagactccaagatagaagggggaagacataagcccccagtatttgtggtgattgtaagaataaaatgctaatattacaagggcttgagtgcccctactcaccagcaccagggccagctatgtctgataacagaacccttagatcctcttaatcttctgggtgggagcagtgagtaagaactaagcacaaggccgggcacagtggctcacgcctgtaatcccagcactttgggaggctgaggcaggaggatggcttgggcccaggagttcaagaccagcctgggcaacatagggagaccatgtctctaaaaaagaaaaaaaacaagcacaattctttccagttgtcgagccctccagccaccccctgccaccttttgtgcaaacacacaatccccagagcaggttcagcgttcacaccctgcttctccccaattctgtctcctcttctccggaatcagatgaaaggacctggggagaaagagaaggtgccggcaacccccacttctggggaaggtttcctaaagaacttgcttcttcctacccagcgctgccagaagctcagatttggtcccctccccatccctgtagctggcaggattggggtgagtgtgcattgatccggaagggtgcccaagtgtgcgtcagtgctagggcctgcttgacagaactgctgggctggttctgctgggaacatgtgctacctgcccctcccccagacacacctgcgactcctctcccagtctttttggggcacagtcctatagcccaaggacaggttgaggccccagtccaggctggaaaggaactggccagaactgaccctctgtcctgccaggagatctttcctccccaccccacccaaattctgctcttttgtcttaaaatcttcaattatacattttcatttcttgtcacttggtgtacttaggtctccagatttgggggaagaggtgcagaggtgttccccaatccctagcagaggggcctccaagatgtcagctcctgattctggctcttccaaccacactccttccctacctgcttaaaacaggtatcttctgcttccccatgcccagccctgggggcggtcagggatcatggtccacaggaggcctttgaatgtcccaggctcttccccagtccctctggcctgactgtccagctggtggcactaaaggaagatgggggcttgtgtcagagagagacggagaagccaactgctctgccagagtagtggggagaggggaacactggggaattctgagtagaaagccacaaattgtggccgggtcagagtcaggagctttggaataatcctcctgccttggctcatcaaagggactggagagctggaagggaagggatcacttcctatctgcaggatgagagagggagagagaacctctcactctccagtcctgcccagagattctgcattttgaactcagggcaagggcaaggaatgagggtgtgatcaggatggagagtgaggttatatttgccctgtactggcttctctattaagtaggatttcttcgagaccctggcatgggtgctgaggagctcttccttgggggccaagagtggtgtggctgaggctagttgcctgtaaagttgagggaaacctgctgtagacccagagttccagagtagaggccgttttttttttttttttttcctcctctgttacccaggctggagtgcagcggtgcgatcttggcttgctgcaacctccacctccccggttcaagtaattcccatgtctcagcctcccaagtagctgggattacagtcacgcaccaccatgcctgggtaatttctgtatctttagtagagatggggtttcgccacgttgatcagcctggtcctgaactcctgacttcaagtgatttgcctgcctcagcctcccaaagtgctgggattacaggcgtgagccaccatgcccaaccccagagttgaggctttcttctgagctgtccttccccacccagccaccccttcttgcacaggttggaacataaaatccagatggaagccttcctttcctggagctcctcatcatgagggcaaagatggcagtggtcccccactttcccatgccctttccagtcctctccatgctgcaagggctcaaggaagacagaggaaggaaagaagtccctaaggcccagagtgggcagtgacttgcccgcggatacacggccacttagcagtgcacccagctccttcctcccaggccaggtctttgtactcccagggcagaggataggaggtaggagacagggagcgagcacagttatctcagagctcagattcccccctccctccctcttccctctccttgattagattaaggaccagctttccgctctctcactccccttcctggggagtgagagctttatctcctaagcccagcagaggtctggcctcaaatctggccagaagttcccatccttcctttatcctgaccacgtgtcattgcaagtctttcttgagatggacacctccaccagggcctgggaagtgctgagttctgcccaagtgctaggagcacacaggacagcatgttctctaacacaagcctgttttgaatggggccagtgggtagagaggaaagggagggagtgagggtggcaagggagacccaggccagcattcagctggaaagggtgggcagtgtggctgcacttcatttccaaggccatctgttggggagtttgtgggtggatgcatgagacctcctcctctggatgatccagaagagggtattcgctgttcccttaaaaaatttttttgaacatgttagatattcctattctttttattttttatttttgtagagatggggccttgccctcttgcctggccagggtggtctggaacccctgacctcaagcgatcctcctgccttggccttccaaagcactgggattagcaatacaagccaccacacccagccatgttcctattttttttttttttttttttttttttgagatggagtctcgctctgtcgcccaggctggagtgcagtggcgtgatctcagctcattgcaagctccgcctcccgggttcatgccattctcctgcctcagcctcctgagtagctgggactacaggtgcccgccaccacgcccggctaatttttttgtatttttagtagaaacggggtttcaccatgttagccaggatggtctcgatctcctgaccttgtgatccacccgcctcggcctcccaaagtgctgggattacagacgtgagccaccgcgcccagcctttttttttttttttttaaatttttactttgccctgagagttttttgtttgtttgtttttgtttttgttttgagacggagtctctctctgtcacccaggctggagtgcagtggtatgatcttggctcactgcaacctccgtctcccaggttcaagtgatcctcctacctcagcctctggagtagctgggattacaggcacatgccaccatgtctggctaattttttgtacttttagtagagacgggattttgccatgtgaccaggctggtctcaaactcctcacctcaggtgatccacccgccttggcctcccaaagtactgggattacaggcatgagccactgcacccggccagctccttctttttaaaaaaaattttctctccctcattggaaaagtaatagatcttatagatctctatgtggaagaaatctaaatttagaaaatgaagaaacctaatctcacaacttgtttaatgaaacattaaaaaaagaaaaagaaaatgaagaaactggctgggcacggtggctcatgcctgtaatgctagcactttgggaggctgaggcgggtagatcccttgagcttaggagttcaagaccggcctgggcaacatagcgaaaccccatctctacaaaaaatacaaaaattatccagacatggtggcacatgcttgtagtttcagctacttgggaggctgaggcaggagtatatcttgaacctgggaggtcgaggctgcagtgagctaagattgcaccactgcacactagcctgggggacaaagtaaggtcctgtctaaaaaaaaaaagaaaaagaagaaactttataatctcaactttagagctaaccgttgtgaacaggtttttatatattcttctgggaatttttttctctgcatgtacaaaagaggtatgtctatagaacatatatggaattatataaagcaaacagttttgcttttctcatttatatcttggacattattccatgcatgccattattccattataccactgccatctttgccctcatgaggaggggcttcagaagggaaggcttccatctggatttttctcattctttttgatgaccacatgagattccattgtatgaatgtaccatcattaattaattaaatcacttgttgaagacacagtctgcccacagccatggtcctccttgcatatatattttttggtacacttggggaagctttcccataagatatattcctagagttgcaattgttgtgtcaaagggtgtatgtatttaaagttgtcatagatactgccaaagtttatgtgtttgtgtagaggttgggtgggagggaaattaaatccagcttcctcatcctctattcccagatctcaaggctttttcaagctaagatgtgtgtatatggtagaggagacattacagtgctcttgctttttttttttttttttcttttttgagacggagtttcactcttgttgcccaggctggagtgcaatggcgcgatctcggctcactacaacctccacctcttgggttcaagtgattctcctgcctcagcctcctgagtagctgggattacaggcatgcgccaccatgcctggctaattttgtatttttagtagaggcagggtttctccatgttggtcaggctggtctcgaactcccgacctcaggtgatctgcccggctcggccttccaaagtgctgggattacaggcacgagccactgcacctggcctccttatttattttttatttttttaaaatttttttcaccagagctgccagtaaaggcgcctgtgctttttgggaggtaaggaataaaatcaccagcaactcagcagaggatttgcagggatagcgagtaagcttgggctcactttccggggctaaggattgagcgccacctgggactgcctggctggtggcggaggtgggcagatggtgaggactccctagcacccagcttgtcacagacgtcaggcagagtgggcgaaacaagccctgaaatagattcccgggatttggcttagggaggaagtgaggctgagaccaagagtgtatgctctgaagggaacacagagaaggaaacttcagcccgaatgaattgggcagcagtggagccctggacctcccccatacagacaccccacccccatgtagagactcccaccaactgctatagctcaaggactcttgtaaaaggaagcagaagcctgaagtagcagatatcttggtcactctggagtgtttggggcttgacttaaggctcctgggaaaatcctgggtctatgcccctcctcagtggagtggggaggtggggaggtggggaggtggggaggtggggaggtggggaggtgagcaagcgggagagcttatctctttagcagtccctacctcctcctattaaatttgttaaatctcatgagaaatcctttggaggagggtggggggacagctgggtttcaaaagcttgttgaaagtgaagtttggtgcttttgattgtatttgtttttataagattaccattgctttgcattccagatgcctctcttatccttaaggagagagaagacagaactgcttactcactctctggaactctcctagcctgatgggggaggaacagagccaccagtctgactttgcagtgccccaaacagtaacccacaaggcaacatacaggttaagacttggctctgccaccaacttctgtgactttgaccgagccatttctagtctcttggcctcagtttactcatctgtaaagtgaggggattgagtaggcaatagcagatcttttctagtacactttctatggttctcagtacaaggtgggcatgggaagctctttaatagtctttctctcttcatctgtttttttgtttttgttttatttgtttgcttgtttttgagacagagttttgctgtcacccaggctggagcgcagggatacaatcctggctcaccgcagccttgacctcccagtttcaagcgattctcccatctcaacctcccaagtagctggaactactggcatgtgccaccatgcccagctaattcttttatttttttagagacagggtctctatcagttaaggttggagaatttatctgggaaggcttcctggaggaggtaaggaaaagaagtcagcttggagccagaattaagtattctgattaatgagggacctggagcattgtaggcttcggagcacctttttggctccacctactcctcaggaggaaaggcctgagtctgaggtttaatagatacagttttgttcctcctttccctgtaattacctggcctgagacactctcagactctgtccaccactcctgtccttcaactcctcccactgtcacctgaggataggctgtatctagattcacattctctacctcctactccagaagagtaggttgtagggcaggtgtcaaagaagagactcccaagctctagacctgtggtgtccaatatggcagccatgagccacacatggtgattgaacatggggagtgtggctggtctgaactgagatatgctgtacgtgtaaaatacacaacagattcagagccttcatgtgaaaaaagaatgtaaaatttcttattaatactttttatattgattatgcatatgttgaagtgatactttttacataatgagttaaataaaatgattaaaattagattcagttgtttctttttaacattaaaatgtggctatcagaaatattaaaattacatatgtggctcacattcttcacattctgtttcttttcttttcttttcttttcttttcttttcttttcttttcttttcttttcttttgagatggagtcttgctctgtcgcccaggctggagtgcagtggcgtgatgtcggctcacagcaacctctgcctccgaggctcaggcgattctcttgcctcagcctcccaagcagctgggatcacaggtgcctgccaccatgcccagctaatttttagtagagatggggtttcattatgttggccaggctggtcttgaactcctggcctcggagtccacccaccttggcctcccaaagtgctgggactacaggcgtgagccactgtgcccggcttcacattctgtttctacagatagtgcatccacatatttggggggaaggagcattatgagtaaaagaatgaaacacttgttctcctttttgtctgaaatcagaagagaaacagggccaggcgcagtggttcatgtctgtaatcccagcactttgggaggctgagacgggaggattgcttgaactcagagttcaggaccagcttgggcaactaaagaagatcctgtctttacaaaaagaaaaattagctgtgcatggtggctcctgtggtcccagctactcagaaggctaaggagggaggattgcttgagcctaggaggcagaggctgcagtcgttgtgttcaaaccactgcaactgcactccagcttcagtgacagagtgagaccctgtctcagagaaaaaaaaaaaaagagaaacagaccagaactgtaacagtatggaaggaaggtaaattataggaaggccttcttgataggaaggactgaaaaacctgaaagatccacatacttcttttcttggaaagctttcagaataggagaggactttgcatatcttaaatcattttaagatggtatcttatcatactatgattctcagtgatccaaacttggttacttagcaggtgactttcctggccttgttcaaggtgttttcaccacacaaacaactcttaattgtctacttggtgatgagcccagatacctggaatccatagaaaattcctaacatgattttacccaatagtttctaatctttcatcagactgctgaggcagcagcaacagtgttgacagactgaggtttcatcatcctgccctcccctgctgcctgtctctgcccaccctctacccccgggaaagtgctggagcagagggagggttcagggaggcaatattgagaaggaacatgccagctgggggtctggataatccacaaactggattatctgtccctgactttgcatagatgtaagcaggtggcctatatgtagacaggatgtactgggatgagccatgggcatctggttaacgtgtgtgtgtatatgggggggtggtcctacaataaattcccccacctacttatctcccatccagagcattaattcaaccaatcactccttctttcaattaaccacatataatatgaatagtatttagcattatttactgtagtttcatagtgagagactagaattttttttttttttttcaagacggagtcttgctctgtcgcctaggctggagtgtagtggcgcgatccaggctcactacaacctctgcctcctgagttcaagtgattgtcctgcctcagcctcctgagcagctgggatgacaggctcacgccaccaggcctggctaatttttgtatttttagtagagacggggtttcaccatgttggccaggctggtcttgagctactgacctcatattatccgcccacctcggcctcccaaagtgctgggattacacatgtgagctaccacgcccggccgaaaaaatttttaaaaatctttattgtgcactgaaggctgactaggggctgacacagcatcctaggcactggagctaaggtgcaatttgtacccaaagaagtgtcttagatctggttcccttgatgtgcagactgagatggggatttgggcggcacatggtttattgtgaggcaaactctcaggagaagggaggaaaggaaagagggtggggcacagagtggggaagcaaggatgtgcttcacagctgagtctggttttggcttgatcctgtgggaagctctgggtggacaactgtatgacagaaaggatcccacctgagtcagggaggctagttttttatgtccctgtcagtcagctaattggctgccctctaggccaagggcaagtccagagatggagagccattggcagccaaaactcacagtcagcaccgggaatctgggtggagcaccaaggcatccactcagggagtagcctgagaagagaagagtgagctgacccgagcaagcacagccctgattgttatccacacttggcaacccagtcctctttctactctcactctcagcctggcctcaacccttatctgcccttgtcccaccttctttctctttctgtttctttttcttcctctttctttccttctttctttctttctttttttttttttttttttgacagcgtctcactctgttgcccaggctggagtgcagtggcatggtcacggctcactgcagcctggaactcttgggctcaagcgatcctcccacctcagactctctagcagctgggaccacaggtgcacaccaccatgcccaactaattactttttgtagagacagggtctcactatgttgcccaggattcctacttctgatcctgccttgtctgtcttgagaatgtttatcaggttgaaaccttgagtttcttcaagaggctccaggaggctgtggctactgagtcattccttgacctctttccttgcctatgggtcatctgagccccactgttcccttaggcagaaaactttgatatccttggggacatctgaccctaaccccttctcttgctctttctcctttattgggtgtacccatcccatctcctgtggtggagaaaggacagttcaagagaaattcattctcaaggcttgactcctacttaaacatcacaggatacattccctggaaggggaagggtgcgtctgtactggcttccttagaaacttcagaacagaaaagacgcctcctttccctccccctccccaattcaaacaggggctgggagagaggaagagattattgtttcagggggtggggggtgtggatggactgagtgctgaaacttccttttcttctggcacagctctatttgtagaagtgccagagtcctggggagaaaagcaagagagggagaaaaagaacattatttgagggcatttggctgctcttttacactcgagatcaaacagagaaaatccagcgtcatgccctccccatctttctgtccctagcatgtagatgtcctgtggtgtgtctcacaaatgcacatgcacatgcatgcgaacacacacacaaacacgcacacacaccctcgcactgttgaaaccagagctgctggctccagggaggggagtgaagaagcagctgtggacaggtatgggtggccacatacctgcccttctgggaggtgacacttccattacacctccacaggtttcatgttgacctcaccctagctttggcccaatgttgtcaggatgggcagaaggatggcagagctcagctggcccaaagccagcaagcaaagagttctcagcaggcccttgaagtgccagcaaatcagttccccccaaggaccaaatctggagaaaactcagcttaaagcacagcagtagcacacactggcttcagcaacacatatactaaaattggaatgatacagagaggattagtatggcccctgcataagaatgatacgcaaattgatgaagcattccatatttttcagtttgtcaagcattttattcttttgaataaaaccaacatgtctataacttaacaaaaaagcagcatagcagcagagattgggcctagatcactaggtgaacttcagtgatggctgagagaagcaccctggagacttcttgagggttgggggaagcccccatcttccctgagggattttcggaaggcagggtgcaggcccaggataaagttccgggtctggattgcagaaagtgaccctggcagcccaaaacctttggcattgctgaatcagaagggattttgactggcctcatgtcacccccagtaggctgggactggggctctaattggctgtaatttgttgatgaatgcaatttgcagctgccttctctctttgtgacaggcctcaattagagccgccaaagggatctagggtgggagggggagctgggatgttgattccaactccttcccctggtccgctctcagcactctgccccatcctgaagcaagaggaggttcttgaggctagttaattgtcccccagcttggccggggaatggtggctcacgcctgtaatcccagcactttgggaggccgaggtgggtggatcacgaggttaggagattgagaccatcctggctaacacggtgaaaccccatctctactaaaaatacaaaaaattagctgggcatggtggcgggcgcctgtagtcccagctgcttgggaggctgaggcaggagaatggtgtgaacccgggaggcggagcttgcagtgagccgagatcacgccactgcactccaagcccaggcgacagagcgagacaccgtctaaaaaaaaaacttgtcaccccacttacagtcagtgatataattttagaacaagtggagagtgagaaaggtataaaatgaaggctgccttcctgcaggttggtctggatgttatggattttaaaacttgaccacgtttcatgtttagtactttcttatttattttagagcttctgaaaattctatagaaaggaagacttttgagctaaaatgtttatttctatcttatagtcctttctccctcttaccagataaagcaaaaaaaatagaaatcagaatgatggggccgggcgcggtggctcacgcctgtaatcccagcactttgggaggccgaggtgggtggatcacctgaggttaggagttcgagaccagcatgaccaacatggagaaaccccatctctactaaaaatacaaaattagctgggcgtggtggtgcatgcctgtaatcccagctactgtggaggctgaggcaggagaatcacttgagcccgggaggtggaagttacagtgagccaagatcatgccactgcactccagcctgggcaacaagaacgaaatcccatctcaaaaaaaaaaaaaaaagggtaacgggccaggtgcaatggctcacgcctataatgccagcactttgggaggccaaggtgggtggatcacttgaggccaggagtgggagaccagcatggccaacatggtgaaaccctgtctctaccaaaaatacaaaaaagttagccgggtgtgatctcagctacttgggaggctgaggcaggtgtatcacttgaacctgggaggtggaggttgcagtgagctgagattgcaccactgcactccagcctgggcaacaaagtgagattccatctcaaaacaaacaaacaaacatctaacctggaagctcaatgtgtaaaacacgacacaactgatccagttaaagtggaactgggggctctgagccccattggactggcctcctccctaaatcttgcctctcctaccccttgccttggtggcctccctatgacagctataaggttcagttagattgaccaactcatcccagtttgtctgactttatttatttatatttcttctgagtggccaatgcagcataccagtcccagctggctcaatttgtctagttttggcactgaaagtcctgcatcctgagaaatatctggaacctgggcaaaccaggacagtttgttgccctaggttcaacagagcatggtttgaaaactagtgatacaatccctctgatctactgatgaagatactgagcccataagagatgtggtagtttgaagtcccatagatagattatcatgcccaggagtgacctgcattggggtggtgaatattgcttctctgtcccgtatctctgtgagaagtaaaactgtccatcgccaaatctctcttctccttcaagacccccttttatgaagccttccttggttcttccagaaagagttgtgttctcttttctaattcttcttttagagtacttatcgggtagagttatttttaatcttgggtctttccattcagactggaagtttcttggttccaagtcccatttgttttcatattcctcagcacctagtgcagcgtctggcatagagtaggcactcaaagatatttttagatagatggatggatggataggtggacagttggatggatttggaggataggtggatgaagagatggatggatagatgaatggatgggttggagaatggatagatggaatggatgggtagagaaaatgacggatgcatggaaggcttggtgccttgttgaagagagtggcatgaaacaattaggaagtttctaggcaagttcttcttgcatcatttccccgctactatggccattttccctgaattcgatttttggaatatctaatgtacgtacattcagatgcaaggaccaaaacaacttcccaagccaattagaagtcacttaaatgtgtcatttttggattatttgtgccattgctttcctctacagaaagttatggtttagctacacaaatacaatatttgatgagaatacctcaaataggcagctgatggcaatgacgaagactgtctgaaaataaaacagcttgaaaatatctgacagtggagagtgtaggaggcagggacagagagtaagccactggtgcaaatagcgagcaaggcgatcaggacttgaggactggaaaggcaagaattatgaaaggaggattcaagacacacattagaaggacttcccaattatgtttggaagcaaaacattagactaaatgattatttgtgatttttaaaaattttatttttgagacagggtctcattatgtcgcctatgctggagtgcagtggtgtgattatagctcactgcagccttgatctcccaggctcaagtgatccactcacctcagcctcctgagcaactgggactacaggtgtacaccaccatgcccagctatttaaaggaatttttttttttttggccgggcgtggtggctcatgcctgtaatcccagcactttgggaggccgaggtgggcggatcacaaggtcaggagattgagaccatcctggctaacacaatgaaaccccatctctactaaaaatacaaaaattagccgggcgtggcggcatgtgcctgtagtcccagctgctggggaggctgaggcaggagaatggcgtgaacctgggaggcggagcttgcagtgagcagagatcgcaccattgcactccagcctgggcgacagagcgagactctgtctcaataaataaataaacaaataaataaataaaagagttttttagtagagatgaggccttgctatgttgctcaggctggtcttgagctcctgagctcaagtgatcctactgccttggtcttccaaggtgctggtactacaggcatgagccaatgcacccagcctattcatgattcttgacctactctctctcaagtaaaatttattgagcatccattctgacccatgtatcaggctaagcactttcacttgtattatctcagcccatcatgcctggggacaggaagatggagttcacacactcttgatgtgcacatttttcttagacgatctcctccacacccgtgcttttaaccacagaagctactttgactctctggtccagctctcctcttgccccacacctttcctttaccctgctgctgactctctcccactagatgtctgcagatgcctccaactgaagggactccacacaggactcatctgttttcccactaaaccttctcctctgcccagattccccatctctactcatggcactctcacctgacccactcaacacccaagtcagaacatgggcatcagctccttttccctgcctgtgccccccatgctggtcaccatgtccagtaattctacttcttaaatgcctcgcagatctgtgttttccttttccttccaatgggagctgccctaaattcaggtcctcaccatttctcactgggttacttccctagcttccttttgctccctttctcccccatctcatattctgggaatccattctttacttagttgccagactcattttccaaaatgcaaatctgatcagtcacacaccctccaagccttttgatgatactctagctgtttttaaaataacatccaaaatccttagcttctctgacaagagccttaacccctcactctgccacaccaaatcccagtacttgctggcctatgcactttcatccccatgccttttcacaggctacttctgctgcctaggaatgcctttcctcccatttataccaatctaattcctcctcattcctcacgattcagtgtgttagatgtcacctcctccaggcagactctctgactgcccctctgctcctgagtctgagtgagctccccctcctctggcctctcactgtgtccagtgcttgtctcttctttagtactgattacgctgtattacagttgcctgtttccttgtgtgtctctcccactcaaatgtgagatattccaggacaggtgtgctgtctttcacatctgcattccttgcgctgcatgttttgcctggcatgtagtgtgcccagtaaatgtttgttgagtgaatgtatggctggtagttctctataatctacgggcctttgatctcattctctctcataggacagtcaattcagtacagtttaagataggactcaagatgtgctgtggaaatcagtacatttttctctctctccttccctcatctctctcagaattcgccggtggccacacccttggcacagacacaggcagctcagtctgcagaacgtcagctggcagcgagcagcccttcccttcctccctggctctgtcttcgcgctcagcacaaatcgtttttcctttttgggtgttcagagctctgatagcagagggctgggtgggagtgtggcagagcgggctgtctgcagggaggcagaaaagcggggtgtgggagagccaagatgtgggtggaagcattgctatgtaggcccttttagagggagaaagaaaatttagctcctctttggggctgcctggggcacagcagctgagatgtgcttgtccccttttgctctccgggggttgggataaccctgttgatatttagcctccttctgagcattggcaagccttctgagagagagaggcaatgagagagggagagattatggattttcaaaactggcccagtacattcccttgataccaagccactgggcagaatcttgggggtcaagctattgctgtttccttgttttggagaacataggaaaagataatctgccacatacctcattcattcattcagtacctgggtgatgccagacactggggacacagatgaataaggcccagtgctcctcctggggctcacagtatacggggcatgggcttgtaaggagatgtgttacaagtgggctgggatggttgtgagaggaaaggcttggcaggcttggaggagaacaggtcactccgtccatggaaagaaggtgatgttggggctctgggagtgatttctgtacggtcttgtacttacaactacctccaacatcagttcctgagaggagactctgtttaactcttcataaagacagcagcagcagccatggtagagaatatggaatttggagaagacaatgtgatttcagaccctggcttaccacctcattcattcattcagtaaatgcctggatctgctgtgaacaattgacatcagttctctgagcctcagttttgtcatctatataattgggatagtggtgacactcacctcaccattctgttgggaggattacatgagctcgtttatgtgataatgctttgtaaactggaaagtgctgtgcaaatatgagctgctaattacccttccatctatccactgattcagtcaacaaataactatcaagtgccctcttctaaaggcctgacaaggccctttttgaggcaggagcctgtttcttgcatgtgcgcgtgtgtgtgtgtggggagggggttgctgtgtgtgaccatagcgcgtcttcattaagcggcaaccatctgctctgtctgaagggaagtcctagtttccccagctctcagccctcgtccccactgcaggcgggcagggacacgttctgcagtctccccgctgagggttgctgctgcacacaggaggccggcagggcgtgtgaatcaccagccttagtcaccactctgcctacagggcttgtcttccctaccagatgatgagcccaaaataaaaatacggctgaagagcgagttagcattccaggctgtctctgagaggcatctgagccaccaggaaaggagctgaatgcattattttgcacttctcccagcccccaaaactcacatcaggagcatcctgggtaacctcagagctgaggggcagcagagagagggacgccgggcttggtggtgagggtaggagactgagggtggctttccgcacagtcaccgtctcagcaggtcctgtccagccacattatcagctctaacttgtgcacagtgctttgtggcttacaaagtgctttgatacactttctctcatttgatgctcatgagaactttgtgagggagttactggaaggcagaacagcctggaggtccagtgtgtggcttctggagccgaacctgcctgactttgaatctgtttttgttgcctactggctgtgggactttgagcaaaatcccttagcctgtttttttgttttgttttgttttgtttttttgagacagagtctcgctgtctcccaggctggagtgcagtggcgcgatcttggcttactgcaagctccgccccctgggttcacgccattctcccgcctcagcctcctgagtagctgggactacaggcgcccaccaccaccggccggctaattttttgtattttcggtacagatggggtttcactgtgttagccaggatagtctcgacctcctgacctcgtgatccgcccgcctcagcctcacagtgctgggattacaggcgtgagccactgcgctggcctaataatagtggtggtgtttttttttgtttgtttgtttgtttgtttgtttgtttgtttgtttgagacagaaaatcttgctctttcaccaggctggagtgcagtgaggcgatctcggctcactgaaaacttctgcctcttgggttcaagcgattctcctgcctcagccttccaagtagataggactacaggcacacaccaccacacccagctaattttttttgtatttttagtagagacaggggtttcaccgtattggacaggatggtcttgatctcttgacctcgtgatccacccgcctcagcctcccaaagtgttgggattacaggcgtgagccacccgcctggccagtaattatttttgtagagatggagtctcactacattgtccagactggtcttgaacttttggcctcaagccatcctgctgcctcagcctcccaagtagctgggattacaggcgcccgtcactgcgcctgcctagtttttgtatttttgatagagacggagtttcaccatcttcgccaggctggtctcaaactcctgacctcgtgatctacctgcctcagcctcccaacgtcctgggattacaggcatgagctactgtgcctggcccagttttctcattttcaaaatggaggtactggctgggcacggtggcccatgtctgtaatcccaacaatttgggaggccaaggcaggcagatcagctgaagtcaggggttcaagaccagcctggttaacatggtgaaacctcgtctctaatgcaaaaaattagcttggcatggtggtgtgcacctgtaatcccagctacctgggaggctgaggcaagagaatcgcctgaacccagagggcagaggttgcagtgagccactacactccagcctgggtgacagagtgagactccgtctcaaaaaagtaaataagtaaatacataaaatggacatactaatagtacagtttttgttttgttttgtttttgtttttattttttgagacagagtctcactctgttgcccaggctggaatgcaatggcaccatgtcggctcactgcaaactccgtctcctgggttcgagcaattctcctgctttagcctcccaagtagctggggttacaggtgcccgccaccacgcctggctaattttatatttttagtagagacagggtttcaccatgttggccaggctggtctcaaactcctgaccccgtgatccacccacctcggcctcccaaagtgctgggattacaggcgtgagccaccatgcctggccaatagtacagtttttataaggttaatattttttaatctgtttattatctccccaaattagagcaaaagctataataaagagggatctttgttttttaagacactgcccgacacagggaggtttgcaataaatatttgtgcaatgaatgaataagaggcttagaacaatgccaggcacatagtagacactatgtgtgctagctattattataggattttttccatttgggcaatgtagaaactgaagtttagagaatttaagtgaattgcctgaagtcacaaagctaagatgtggcagatttggagctttaaataaagctgctactctaaaataagggcccctcctcccacactgtgactaccccagttcctcctcttctttcctttctttaatctctttccttaccttccccagatactcattaaaattgagcaacagagttaatccacttccttgtctgcagtatagaaagctgtagaactggcctggcgcggtggctcatgccagtaatcccagcactttgggaggccgaggcaggtggatcacgaggtcaggagttcgagaccaacctggccaagatggtgaacccctgtctctactaaaaatacaaaaattagctgggtgtggtggcaggtgcctgtaattccagctacttgggaggctgaggcaggacaattgcttgaacccaggaggcggaggttgcagtgagccgagatcatgccactgcactccagcctgggcgacagagcaagactccatctcaaaaaaaaaaaaaaaaaaagaaagaaagctatagaactttcagcaagtcacataacttctgtgtagcacagtttctccatctgtgaaatggacgtcataatataacccacctcacaattccacttttgtgaatattaagtgatagttaatatatgtagtgatgaacacatagtaatagctcaatacacaaaattttttttttttttttttgagacggagtctcactctctcccaggctggagtgcagtggcgcgatttcggtccactgcaagctccgcctcccaggttcatgccattcttctgcctcagcctcccaggtagctgggactacaggcgcccacaccacgcccggctaattttttttgtatgttttagtggagacggggtttcaccgtgttagccaggatggtctcaatctcctgacctcgtgatccgcccaccttggcctcccaaagtgctgggattacaggcgtgagccaccgcgcccggccacaaaagctattaatcatcatcttttggggaccactagaacatatccaagatttagattcatagaatgttagagttggaagagatcttacagaatatgatccaattttaaaattggatcacatatgagaaataaaaattttcacatatgagaaaataaaaacccagaatcatttgacttgcccaagaatacaatacttgagttgggtgcggtggctcatgcttgtaatccgagcactttgggaggctgagatgggtggatcacctgaggtcaggagtttgagaccagcctggccaatgtagtgaaaccgcatctctactaaaaatacaaaaaattagctgggcgtggtggcaggtgcctgtaatcccagctaatagagaggctgaggcaggagaattgcttgaaccagggaggtggaggttgcagtgagcctagattgcaccattgcactccagcctgggcaacaagagcaaatatccatctcaaaaaaaaaaaaaagagagaagaatacaatacctatttttaaaaatttatcacctaggagaaactgggtaaagtgttacaggcactctgtctactatctttacaactcttttgtaaacctaaaattatttcaacataaacataacaacaatagctgctgcaactattcctaaaaaaaaaaatcatgtaaattatagggcagagagaagaagacagtgtgtggggggtggggaggtgtttaggaatatttttctccaattaccttgttccttcccaaaagagatattgacctatattctagtacactttatcctgtcttctgctatagccaacctgttgaactcatccatttatttttttctttcttttctttttcttttttttttttgagatggagtttcgctctttctctcaggctggagtgcagtggcacaatctcagctcactgcaacctccgcctcctgggttcaagtgattctcatgcctcagtagctgggattacaggcacccgccaccatgcccggctaatttttatatttttagtagagacggggtttcaccatgttggccaggctggtcttgaacacctgacttcaggtgatcagcccacctcagcctcccaaagtgctgggcttacaggcatgagccatggcgcccagccttatccattgatttcttaatttcagataccctatttttcagtgtacatttgtggatttttttgttatcaaaaaaccatttttttttagattctaattctctgttgaaattctccatattatgtgcatcttttcctctattttctgaatatattaatgataattatttagaagtccttgtcgtctaactctgatgtctatatcatctgtggatccacatcttatgttttctatttatcagtcatatatttttgtcttttcacattgcgatttttgactgaatgttggtaaaatacacacaaaagcactattgaggctccataaaatatttattttccaccagagacagtttacacagtcctctgcaagacacaaagtgtggttaatcccctcaatccagtcaggaactcctatgagtccaggctgtattacatatttggtgaggttcagttcatctctgtttgagtccattcctaggttgtgaccctactcagcttacggttgagggcatggccgactgtgtcctcaacaccaagagaagcataagaatttccactctgcttttcagagacttgtcagtttctctctttagttttcctccctgcatagcttcagacttcagcagatgttatgagagggaatctggctacctatttaagacccctggatgggtcttggtggttcatgcctgtaatcccagcactttgggaggctgaggtgggaggatcacttgagcccaggagttcaagaccagctgggcaacatagtgagattctgtctctaaaaaaaatttttttttaattagctggttgtggtggcaccagctggtagtcctagcactttggaaggctgaagtgagaggatcgcttgaacccaggagttcgagaccagcctgggcaacaaagcgaaaccctgtctctacaaaaagtaaaaataattagccaggtgtggtgatgcatgcctatgggacccagccactcgagaggctaaggtgggaggatcgcttgagcccaggacttcaaagttgcactgagctataatcaagccactgcactccagctggggtgaaagaatgagaccctatttcttaggaaaaaaaaaaagagagagagagagaaagaaagagtgagagaaagagacccttcaagtatcccattttgtgtttccagtccccgtgtgaccgtcagaagctctgctggcttctctgcctagcagcaatgccttctgtgtaggacaaacccagattatcaatctcgagtcttatctagagttagaaaatgctcctggggaaaaggagctgcagatcttcattcatctcggaaaggtgaacccttccctgtaatgtcagtctctcttatgaacttctgcagctctctgatgctttcataaatatcatttttgcagtttacctggcttttttagatgttcccagaagaactattggcttgctgtgaactattttgtcctattcagaaatactctcaagatatattctgatggattgaatatattatcataggttttgttggaacaaaatctcttgagaaatcattttttcctttatctcttcctcttccccccacccccagccctctagatgtgggtatagagaaagaagcaccttgggtcaattccagatctcctgctcacctagtgtatgggattagagcatttatttaaactctctgcctctcagtttgatctgaaaatgaggatcctgtgaaaattaagtgaggtaacactgtatggcacccagcacgaaggctggcacatggattttaatgcctttcacctctttcttctctctcctctccccacagctgatttgagcaagcttcctcttagtggctgggagagttttcccacaaagggatcaaagctaagtggtttagtgctggacgcggtggctcatgcctgtaatccctgcattttgggaagccgaggcaggaggattacctgaggtcaggagtttgagaccagcctggtctacatggcgaaaccccatctctactaaaaatacaaaaattagccgggcgtggtggcgggcacctgtaatcccagctactggggaggctgaagcaggagaatcgcttgagcctgggaggcagaggttgcagtgagcccagatggtgccactgcactccagcctaggcgacaaagagaaatggtctctcaaaaaaaaaaaaaaaaagaaaagaaaatgcttagcggttttgtttgtttgtttcgtttcacttttgagccggagtctcactctgctcgatctcggctcactgcaacctccacttcctgggttcaagcgattctcctgccttagcctcccgagtagttgggactataggcgtatgccaccacgcctggctaattttttaaaaattttcagtagagatggggtttcaccatgttggccaggctggtctcgagctctcccttggcctcccaaagtgctgggattacaggcgtgagccaccgcacctggccagcttagtggtttaaaggtagtttctctactgatgactagaaaggtggtcaatgtgtccagtcttaggggtaaaaggagataaagcaaggtctttactcacagcatgtggcccttggaaatgacaacttcaggatatggagaggctaagagtaatttagaagcggtaatggagcttcccagggccaggcggggtccacgctcatagctatctggaggtggaagacactcatgggacagagctactcaaatctgtcactcttcagtcgctttcctcagccccctagacaaggcacttagacgcacggtttcatttaaactctaagcagaagcagtggtgtgctggacttagctcaaaccatcttggatattgagagctgaatgttgaattttcaggaattttatgagctggttgacttcatgttggtaacttaaaatctgcgatggtgagctgggtgctgtggcacgcacctgtaatcccagctactcaggaggctgaggtgggaggatcacttgagcccaggagttcaagactagcctgggcaacatggtgagacccccatctcaaaaaaaaaaaaaaaaaaaaaaagctgccatggtgggaatatttatatgatggaaaccaatgaacactacaaagaaaggatttgcgtttcttctggagagccagttgttaaatatttactagcaaaccactgaacataagtgtttttaccaatttacagttgagtaaactgaggctttgagacccaagttctctcagagcataagtaagtggcacagccagtattaaaatctggctctatttttcatttatttattatttacttctttctttctttctttattttttgagatggagtctctctctgtctcccaggctagagtgcagtggcgcgatctcggctcactgcaacctccacctcccgggttcaagtgattctcctgcctcagcctcccaagtagctgggactataggcgcccgccaccatatctgcctaattttttgtatttttagtagagacagggtttcgccatgttggccaggctggtcttgacctcctgacctcaggtgatccacccacctcggcctcccaaagtgctgggattacaggcgtgagccaccacgcccggcccattatttttgttctcaggatggtcatatataaccccaggataggaagaaataaaaatgctgtacttcccttcccacccccactccctgccccagtgtgagtatccaaagaatatcagaatctcacttctgctcactgtgatcctcaccgtgatccctggcccaagcggtcttcccttaatcatccccattctacagactgggaggaagccccataaggttcagtgactcccagccccgggctcacacattagtgccaggactcattagaggcctctccacctgaatccagaaacccttggccatgctccagctagctgcctgataaaggagcagaattctcgattcaggttcaggttcagcaaccatgcacatttcctttccttttcccttcaggtgacaggaagccattgctggtcctcaggcaggctctgttcattgctgccacagcctaaactgcaaacatggcatatctgggtgccgctgggaagcaactcattgaggagagtgtggcagatgctgctgagaggctaggaatgtagagtaaggtatcagcaggagcctgggcaacatagggggaccccgtctctgcaaaaaataaaaatacaaaaattagtcacgtgtggtggtgcatgcctgtagtcccagctactcagaaggctgaggcaggaagattgcttgagctacaaaggtcaaggctgcagtgagttgtgttcgagccactgcacttcagcctgggcaacatagcaaggccctgggtatgaattctgactccccaccttagctgggggaacttggactaatcactgtgatccttagttgtataatttataaaatggggatattaatctcgtcaggcgcggtggttcataccaataatctcatcaccttggctggaggattgcttgagtccaggagtttgagaccctccctggcaaaatagtgagaccctgtttctacaaaaaataaaaaactagccagggtgtggcggtgtgtgcctgtattcttagctacttgggaggctgagatgggaggaacacttgaacccaggaggttgaggctgcagtgagccatgattgcaccactgcactccagcctgggtgacagagatcctgtctcaaaaaaaaaaaaaaaaaaagaaagaaagaaaatgagaaaatgaaaaagagaaaacctgaagattaactgagccaacatgcagcaccagggctggtggacaatcagtgcccaataattagtagattgggggcacaccaaagggatgttttggacaaatgttaaatcaatatttggctgaggctgaagaaaaatatcattaccacataataaaattctcagctgggcacggtggctaatgcctgtaatcccagcactttgggaggccaaggtgggcagatcacttgaggtaaggagttcgagaccagcctggtcaacatagtgaaagcccacttctactaataatacaaaaattagccaagtgcaatggtgcacgcctataatcccagctactgaggaggttgaggcatgagaatcacttgaacccgggacgtggaggttgcagtgagccgagatctcaccactgcactctggtggcagaatgaaactgtgtctcaaaaaaataaaataaaataaaataaaattctcagagtcaagaataaatcttatattttattaaagatttagttactgctgcaagtttattatttaaaaaatttagtagtcatatctctaaagcttgtcctaatgcagaaataatactttctcagcacattcagcacctgaattgttccttcggtcactacttggcacatttaggttataagtagaagttcactttctattattattattattgttattattattttattagtttttgagatggagtctcactcttgtcacccaggctggagtgcagtggcacaatctcagctcactgcaatcttcaccttctgggttcaagcgattctcctgcctcagcctctgcgcctggctaatttttgtattttttgtagagactgcgtttcgccatgttggccaggctgttcttgaactcctgacctcaagtgatctgcctgccttggcctcctaaagtgctgggattacaggcatgagccaccatgcccagctgataagtagaagttcactttcatctggggttaatggagggtcaaaacgttttttggatatctcacttatctgacattttcttctttcttttctttttttttttagagggagtctcactctgtcacccaggctggagtgcagtggagcaatctcggctcactgcaagctccacctcccgggttcacgccattctcctgcctcagcctcccgagtagctgagactacaggcacccgccaccacgccggctaattttttgtatttttagtagagatggggtttccctgtgttagccagcatggtctggatctgacctcgttatctgcccgcctcggcctcccaaagtgctgggattacaggcatgagtcactgtgcctggcctctttattttctttattgcaattggattgaatgaaacccgtcatgaatgttgtgtatgttttttctcttcctgaaattttgaagtgacaatgttgacatttgcttttggtgcaacttcacaagatatggaaattctcagatagtcttttttgaaagactcatggactaaataactaaggattacaacactcaaagtttattttgcttaaggttataaaggctagttcaccaaacaattctactaagactagaattatgatatggtaactattattttgtcttatattatcgtttaaattttcataaatgtttcatggcctaaaaaggctgtaatattttccctaaggtttctagctcagagtcattcagtgtgggtcctcaggctagtagcattaccaaaacactggagtttgttagaaagacaaattcttgggccagtccagagacccattgaatgagaacatttggaagacaggttcctggaatctgtattttaatcagctctccaatgattttgagtgtccgtaagtttgagaagcactgatctagccaacacacactcctgataattgcatagttgtccatctactttttatatcaccatttgaaagttccaaactgttttggtacatagatcatcattaaatattacagcattttaaatcttgagacaaacatttcaacacatagagacacacggagatttttcactttttttttttttttttttgagatggagtcttgctctgtcgcccaggctggagtgcaatggcgcaaactcggctcactgcaacctctgcctcccaggttcaagcgattctcctgcctcagcctccctagtagctgggattacaggcatgtgccaccacacctggctaattttgtatttttagtagagacggggtttctccatgttggtcaggctggtctcgaactcccgacctcaggtgatccgcccgcctcagcctcccaaagtgctgggattacaggcatgagccactgcgcccggcagtttgttttgtttttagtctgcaaagtgggaaatataatccctgttgtgggactctactggcaccaagtgggaaggggattctctgccctaatagcttccctgacagaggcaggaaggtccctaatgaatctgtttaaagacattttgcttggtttatttcctcttctctcccagcctatcaaggtaattgtgaataacccatgaaataccagatgtgaaggtgcttcatcatccaaaggggaccgggagaaggagcccaactagttaccttcctactggaaggcatggtcccactgacacagtttctgctcacgaacacatggtagttgctgaagaaatgtcctttgaagagtgttttgtggcctgaatgtgttctctgcaccctgctttctctcattcttttatccatttgctcatttgttcacatggccagcattccttgagtactgctctctgcaagtccttgtctgggcactgggcatagagtggagtgaacaaggcaaaccaggttcttgctctcaagcagtaaacaatctgtgggacagagagagtcctggaggattccagtgctgtgtgattggtgtcaggatagagggacacacagggggactgtcggattgcagagttctcatattggtccttctcaagtataaggaggatctgctaagcatggaatttcccagcccaacctgagatatatccctttgctctcaaaggtccagggtagacagcagatagagaagctctaggacggtcccaggggaggaatcccgactgggcacattcttactgtaaccttacttccctgaccctgctgtctccctgcaaggcatctgtagcaccggccttgccattttagccttctccaattagacatcactcatgaaggcagggagacttggagtgaagcctggccaatgggttatttattctatcgtttgaatcacaatacatctccaagcttacccttgatttggctaattcaagagattaaagcccagatgtgatgggggctgtgctgtcacaaaatgtcacaaacccctcattttgtgccagctgatgagagactaattgcccagacggtgagagagcatgattagtccttcttttatgccaagccccgagggagatgagaattaatcgtgcagcccggtgggaggggctcttctgtctcaatgcgctctctcaagctggcgagaaggttccctgatgaatatgcagtagaggaagctgatttgtcttcctgcttagcttcagccaggtccagcaataacttctgattctggcaggctctgtgttcaacatggctcttccctccaagtcttctctctctggctgcatattttgtttccccccttttcctgcatacttcacttcttcacctcccacacatccttttcaatatgtttttatgttcttggcaacccttaccaaggacaagactgacctcctactcatcaagactaatgtttaccaggatggtcctcatctatttgacctctctgtaatgtttgaagctgttggccactttttccttctggaatctctttccttgtcttctgggagtccttcctctctcactttcctaatcttttcttctccatctccaacttcctcccccaccctgaaaatgttgacatgttcccagttctctgtttcagttcttttcctattctctttgctccctcagagagtgacacatgctgttggttgccaattcaacactcattctctcttctttttttttttttaagatggagttttgctcttgattcccagactggagtgcaatggcgcgatctcggctcactgcaacctctgccttccaggttcaaattattctcctgcctcagcctcccaagtagttgggattacaggtatgtgccgccatgcttggctaattttgtatttttagtagagacgggtttctccatgttggtcaaagtggtctcgaactcccgacctcaggtgatccgcccgcctcagcctcccaaagtgctaggattacacgtgtgagccactgcacatggccttttttttttttttttagacaagtcttgctctgtcacccaggctggagtacactggggctatcttggctcacagcaacctctgcctcctgggttcaagtgattctcctgcctcagcctctcgaatagctgggattacaggcgcaggccaccatgtttggctaatttttgtatttttagtagagacagggtttcaccatgttggccaggctggtcttgaactcctgacctcaggttatctgcctgccttggcttcacaaagtgctgagactacaggcaagatacaccgcacccagccattctctcttcttgttcagggagggtgacccctcctctgtgccaaaggatgaatcatgattggttcaaacaatcatggtaaatcatttatctttgcctatgatttaagagtggacacgtaggctgggcacagtgactcacgcctgtaatccccgtactttgggaggctgtcgcggctggatcatgaggtcaggtgtttgagaccagcctggccaacatagtgaaaccctgtctctactaaaaatacaaaaattagccgggtgtggtgacacgtgcctgtagtcctcagctactcgggaggctgaggcaggagaatcgcttgaacctgggaggcgatgcttgcagtgagctgaaattctgccagtgtactccagcctggctgacagactgagactccgtcaaaaaaaaaaaaaaaatgattagacatgtgacatactccttgccaatggagcacaaacagaagtttagatgggaggcatttcaggaaacaaatgtgtggggagaagctgccttttatacctttaaacaagatttgaggacatggtgcctgaagctgtagaatccatctgcagctgagcctggggagaagttgaacagagtcagtcacagtgatgctgtcctgagctttgaggtagttaagccagtaagtgaatcaatcctggactgaacctgctattctcatttttgagttgctatgagttgggttttctgctacctgcagctgaaagcattcccaatggtacatagggagatactaacatctcccatgactttgactaccagctctgcactgttgctgccaaagtttatgagtttaattcagatctcttacttgtagcatcatagatgtcttcacatgaatatccctcacacttaagatctaaacaaaaccccatctgtatatcctcttattctcaggccaagtcaactggctttccatcatcctgcagtaatttgttcatacctctgttagagcatttgtcccatgagtttgtttgtttaactgtgtctgtcttcccctttagaatataaattctcctttagaaccttttttttttttttttgacagagtcttgctcttgatctgtcaccaggctggagtgcagtggcgcaatctcggctcactgcaacctccacctcctgggttcaagcgattctaccacctcagcctcccaagtagctgggactacaggcgcccagcaccacatccagctaatttttgtatttttagtagagatggggtttcactatgttggccaggctggtttgaatttcctgacctcatgatccgcccacctcggcctcccaaagtgctggaattacaggcataagccactgtgcccagcctagaaccttatcacatctttaaatccctagtattaagtagaagctattatatacttgttgaacaaattaattggcaaatgttcagaatgttcagaggtgttcaactgcaagtaacacaatatctaaagactagtgacttaaattgtaaagatgtttacctatctcacaaaatgtgaactttggagttacattgttccaggattagttaagcagctcatcaaagtcaggaaactgagtcagaatatctgagatcctcttggctcagaatctctgagattcttcattgttgcaaagtagctgccacaactccaacattacatctttgcacaacaatcttccaagcaggaaacaagggaagcagatcttggtggcagcaaaagggcttccacttcacatacttctctctttttaggggggtgcaaatccttccagaaacaactctctgcattgttaactggaactatgttatgtatccccttggatcaatatctggcaaagggaacagcaatgaccgagatcggcttagaccgatcttgagtcattcctggtgctggtcatgttgctgtctgaccaaaggaggattctgaatcaaggtgggagagtatctaccggataggtgattaatgatacttgcccttgatgtggtttcctgagtccaagctcttccagaaccctcgctgtttcttgggcacttctgagatacacatagctctgtggtcagcctgttcctttatagaacaatccctatattctccatgtttagtgatccatagcagaggctgattatgtgcagttgtataactctgtgaacttgctctttagcagggctagtgcacacaggagtcagtgtcaaggggaggtggatggcggcaactttgcttgccaagccacgcaccttggcatggggttgtgtctgtttggaggtaggagtatcttgttgcaattctcacaaaggcactgtaatggctgtggctgctctgtcttccagaaaggctgtaccagcatggtgagtgtataatggacatgagcatggacatgggatggacatgagaatgttcatctgtctataccctctccattactaggtataatcactctagaaaatctttaataatcttttatctggtccccttggctttagcctttccctatgcacttgatatctactcccagatttaccttcccccaaatctcaaagcagttgcttccttgcttaaaatcttctgttgactgtctttttttgtggggggggacagagtattgctctgtcacccaggctgaaatgtagtggcgtgatctcagctcactgcaacctccacctctgggtttcaagtgattctcctgccttagcctccgagtagctgagattacaggcacacaccaccatgcccagctaattttttgtatttttaggagagacagggtttcaccattttggccaggctggtcttggacacctgacctcaagtgatctgcccatctcagcctccaaaagtgctgagattacaggcgtaagccaccccaccagatctgggactgtcttataggtatacgttaaaccccttacttgacattatgggccactcaagatctggccccaccctatgatcccaaccttatttctcattatgaatctttcaccgaagccaaaattttttttatgctgctcttcaccctcaaattcctttcttcttcctttctgcttattcttgaagacatggctcagatccaatctcctgaggaaacattccttggctgctctagcctaccctcttatcacctctgaattccttccattcagtggttctcaactttggctacaagttaggattacctggtgagctttagaaaataccattgcctgggtccagccatagacattttgatttaatcaatcttggtgccagattggactctgggatatttaaacactccctaggtgattctaatgtgcagccaaattcctggactcatttggagtttttgtgttgcatttgtgagttttaaaaatcagattcctgagctgcacctccaggggttctgacatctatataaaagctccccaggtgattctaaagtgaagcttgattgagggccactgttctgtgcttacatatttttattaatattttgttttgggccaggcgtggtggctcatgcctgtaatcccagcactttgggaggccgaggtgggcagatcacaaggtcaagagattgagatcatcctggctaacacggtgaaaccccatccctactaaaaatacaaaaaattagtcgggcgtggtggcgggcacctgtggtcccagctactctggaggctgaggcaggagaattgcgtgaacccaggaggtggagcttgcagtgagccgagatcgcgcccctgcactccagcgtgggtgacaaagcgagactccgtctcaaaaaaaaaaatgctttgttttttgttttgttgtgtttttttgagagtttccctctgttgcccaggctggagtacaatggcaccatctcagctcactgcaacctccgcctcccggattcaagtgattctcttgcctcagcttcctgagtagctgggattacaggcatgcgccaccacacccagctaattttgtatctttaatagagaaggggtttctccatgttagtcaggcttgtctcgaactcccgaactcaggagatctgcccacttcagcctcccaaagtcctgggattacaggcgtgagccaccgtgcccatccttatttatttatttatttatttttgagatagtgtcttgctctgtcattcaggctggagtgcaatgacatgatcttgtctcactgcaacctccacctcctaggttcaaggattctcctgcctcagccccccaagtagctgggattacaggcatgcaccaccatgccccactcatttgtatatttttagtaaaggaggggtttcgccatgttggccaggctggtcttgaactcctgacctcgggtcatccgccctcctcggcctcccacaatgttgggattacaggcaggagccaccatgcccagcctctttcagttttatttctatgcataacaaaatggcattatgcgatggcttgtgtttttttttttgtttttttgtttgtttgtttgtttgtttgtttttgagacagggtctggctctgtcatccaggctggagtgcagtggtgcgatcttggctcactgcaacctccacctcctgggctcaagctatcttcccacctcagcctcccaagtagcacaggccaccacacccagctaattttttattttttgtagagatggggtggtctaaaactcctgggctcaagtgatcttcctgtctcggcctcccaaaatgctgggattacaggtgtgaaccactgcgcccaaccctgattttttatcttcacttagcaatatatcatgaacatttgcctttgttagtaaatattcttctatagcaagaatattgaatattagttggcaagctttttctataaaggtctaggtagcaaatgtttcaggctttgtgggccatacagtttgttgcaactctgttgttctagcatgaaaacagccatagacaacacataaacaaatgagtgtggctgtgtttcaataaaactttatttacaaaaacaggatggacattcatttggcttgtgggtgtgtttcctgactcctgtcttatagcacggtttcttttttagagctcactaagatcccattgtatgtctactctgcaatttttattctcttaaccttgaatatttagttcatttccattttttaatattacagagaatcactgcaagtaatatctgtgcatctttgtctcccctgtccacccccaagataaatttctaaaagtgtattgatgggccatgggttttgcctaatttttagagcttgcgactcaaattgcccagtggcccttcaggaagtacaggagagggctgcccacttcttgcatctttgccaaaactgggtattaaaattccttttaatctttgtcaatatactttgtcaatatactttttttttttttttttgacacggagtctcactttgtcgccaggctggagtgcagtggcatgatcttggctcactgcaacctctgcctcccgggttcaagcaattctttcgcctcagccccccgagtactgggactacaggcacgcgtcaccatgcccagctaatttttgtatttttagtagagacagggtttcaccaggttggccaggatggtctcgatctcttgacctcgtggtccgccctccttggcctcccaaagtgctggaattacaggcgtgagccaccgtgcccagccgatatatactttaaaatatttttaactgtaattttaatcccatggcatcttaatttaatggtttttgtcaccacaaaaccggtgtttgcagatcatgaagcaaagatacatgtgtcctttgtctccaaggtgctggcttttgacatgctgtgaaactgccccaagggacagtcagataaaacaaattacttgcttcagaagcaaaccctgtctgtcaagttattggatacaagctgagaccccagagccctgctcacagataagtattcagtggagaaagtaggaagattactataagtctgaagttaaatatcctctttttccgacctccagtaaagggaaatgtattttggaacttatgtaaaaatgtctttgtgatttttgccttagaaaacaaacctgactcctttgttttaagtccaagggctgatggtccacccccagggatggggggtgtgtcctgtcacacaggaggtggtgctttgtgtggcttccagtctctgctggctctttaggagttcaatttgggaaagggaaaaataaggcaacttaagttgctgccatcagttcctgggatgaatggctaagtgatgatgctgatgaacaatttgcagctaagaggctgtttgggagttgaagaatagcccatgattgcagataaacaccacctgccatgctgtccaccgcagccccccttctacttgggaggcagaggttctccttttccttctctctccattgcttttatgctaatgctttagagctggatgagaaaaccggatttatagaaagtctagttggttcctctggcaaaagccatttccaattgaagcttgtctacattttaactaaatcagaaaaatggtggctgcagaggctctttaaaaaaaaaaagaaaaaattattggccgggcgcggtggctcacgcctgtaatcccagcactttgggaggccgaggggggcagatcacgaggtcaggagatcgagaccatcctggctaacacggtgaaaccccatctctactaaaaatacaaaaaattagctgggcgtggtggtgggcgcctgtagtcgcagctactcgggaggatgaggcaggagaatggcttgaaaacccaggaggcggagcttgcagtgagccgagactgagccactgcactccagcttaggcgacagagccagactccacctcaaaaaaaaaaaaaaaaaaaaaaaagtttaccctactttcaagccaacgagttatttttttgtttattattattattttatttatttatttgctttttgcagaggctctttcctggtccttgatggtcccctttgtgtggactgtggacatcatgattgttggaatgcagattccatggccctacaccggatccctggtaggctgggaatctgcattttgacaagcttgcctaggtgatttcataaactctaaggcagtgggtcctaaacctaggtgagcctcataattaattggagggtgttaaaaactatagatcatcaagccctggtccctggagatcccgattccacaggccagaatctgtggaagagttcttgcaagggactcatggaagcagccaggtctaggaattactaccttaaggaaattactggaggtgaaatattcagactctcttattcattctacaagacctagagcagaagaggccagaagggggccggaggtgccaggatcctttctggggctgcctttgtgtttatctttggacctgggctgattgcttggaaccaggcaagcagtaactacagagtttagaagcactttggatcagcccctcatttgcttgtgggagggaattgcaaccgcagacactcgtttcatcactgagcatgtctgagctgggggaggatatggggtgggatggcaagggcattggactaagcaggcctaaaatattttgggtttttttgttgttgttgttgttgtttgagatgggggtcttgctatgttgcccaggctggtttcaaactcctgtgctcaaatgatctggcctcagacgcctgagtagctgagactgcaggtgcacaccactgtgcccggctagaaaatgtttactctaagtttagtcaattctgtcaacttgagcaactttacctaatgtctctgatcttcagagtttttattcgtaaaatgaatataactctcattgtaaacattatatacggccaggtgcggtggctcacgcctgtaatcccagcactttgggaggttgagacgggcatatcacgaggtcaggaaatcgagaccatcgtggctaacacagtgaaaccccatctctactaaaaatacaaaaaaaaatttaccgggcctggtagcaggcgcctgtggtccaagctactcgggaggctgaggcaggagaattggcgtgaacccaggaggtggagcttgcagtgagccgagatcgcaccactgcactccagccctggtgacagagcgagactccatctaaaaaaaaaaatttatatacaatttattaatataacaaagaatggaaataataaatagcactatggcaatgcactaaatcacagaaatgcaaattcaaaccaacttgaagtataatttcacatacatggacggttttttttttttttttgaaatggagtctcactctgtcacccaggctggagtgcagtggcatgatcacagctcactacagcctctgcctcccaagttccagcaattctcctgcctcagcctcccaactagctaggactacaggtgcccaccaccacacctggctaattttgtatttttagtagagacaggatttcaccatgttggccaggctggtctcaaactcctgacctcaggtgatccccccgcctcggcctcccaaagtgctgggattacaggcgtgagccaccgcacccagccaagatttttaatattaaagtagtctgggtgtggttcatgctactggataggttacactctatacaaatgaaggattctgcccaggaccaataagaggcagagctctgcccaggaccaatcaaaggcatcccatctgtgacctatgagcaaatgaaggtttcagaatggaccatttacagaaattcccgtttttgacataagggaggggaggttcagagagggaagggcctatccagtggctcatgcctgaaatcccagcattttgagaggctgaggctggaggatggcttgaggccaggagtttgaggctgcaattgaggcaggagaatagtgtctggaggcaggaaacctaaggccaacccacagctgccttcttggaattggactgaaagaaaaaccccacctttccatgaccaagtgatgaggggccaaaggcccctctctctctgaacctcccctcccttatgtcaaaaatgggaatttctgtaaatggtccattctgaaatcttcatttgctcataggtcacaagtgggatgcctctgattggtcctgggcagagttctgcgtcttattggtcctgggcagaatctttcatttgtatagagtgtaacctatcagacgctgctaaagggtgcttaggggtgttaccatgctctttcaattcaatgaaaaccccaagaaactttacaatcagggttcttgagccactctgtggagtgcactttcacttcaataaatgtatgctttcatcttctattgttttgtctgtgcattttgttcaattctttgttcaacacgccaaaaacctggacaactcagtcaaggcttcccatcctataacacaatgagctatgattgtgccactgcactcagtctgggcgacagagtgagaccctgcctctacaataataataataataaaataaaagtagatttgtgcaatggaacactatgcaggcattaaaaaaatcattcattatgaagaccatgtagcaacaaggaaaacatttataaatgtttagtgaaaatagcagaaccccagatggtataccctttgactataaccgtgcacactgagagagagcatgtagacagggccaggaggtaacatgcaaaacagggtagttgtgcagaggataggcttatagttacttttttctttgccaaaattaaaaacaattttactgttacattcttttttcataataggaatgactaattcctgcccttctaccatgctggcttgttcagcggaccaaatgaaaaactgagaaaactgttgtgtcttcccgtaggatgttggagtgaatctaccatgcatgactcatgtttccatccctatcatcctgggtagggaagcaccaagctgaggactctggatcctttcaggctctaatgacaatgcacatccagcatttgtggagtatgtatacagttgtctgggccaactactgtgggaagaggaaaagaagtcacattgctactggtcatcaagagctcacaaaatagatgtagacatcatttggggctatctacttatcctagtgattctcaactgaggttgatacttaaatttttttttttcattttcttttttttttaagtttcaagaggttgatacttttgattgtcacaatgattggcttttgattgtcacaatgattgggagcgttattaccactcacatatagtaaatgaaggatgggatagtcctacacaaaaaattatctagctccaaatgtcctcagtgtctctgatgagaaacactgatctagtccatagtcagggctgccaggtatgggtgtgcaggttgcccactgtacaactcttaagggaaccattcacctggtggctaagtgtgtcaattctgaaaccatactgcctgagttccagtgccaactggaactgccccccaccccctacttctttttttttttttgagaccgagtctttctccaccacccaggctgcagtccagtggcacagtcacagctcactgcagactctacctcccgggctcaagtgattctcctacctcagcctcttgaatagctgggaccacaggcaccaccaccacacctggttactttttaaattttttgtagagataaggtctccctatgttgcccaggctggactcaaaactctgaggctcaggtgatcctcctgcctcggcctcccaaagtgctgggattacaggtgtgagccaccggacctggcctggaagctcttgaacatattgcttatcttctgtggacctcagtttcctcatttataaaatgggaagagcaatagtaatataactcatactgataacataagaatatgttatcaataatatatgttcctgcacatagcagacattcaattcatgttcaatgattattattctctgagatctgacttccccattgactggggtggggccctggtgtctactccctgataaagaccacgtatgcctggattcctgctctccctgaggcttaactttcctggttccacctgtaatctcattgagaactcccattgttgcctaaacttgcttgagatggtttttgtaatctacaaccagaagtcttaattactaagacaaggtgaaaagactcacctgtaggaaacacagtagataatacaaaagggctttcaagttagtgtgagactgcttggcatagaaagacgataaatgccacagacaaaacctaatcgtaactgaaataaataaattcgaacaacaaattgttaagtgaatggaatgcagctagctaggatctcatgctctgttctaagaaaacagacaggtcaaacaatcaggaccagtccagacatgtgtctgggaagttaaaggaaagagaccctgtccctcaaaaccttccttactagtgactcatgtcttcgtttaccaggaggtcttctttgaaaatatgaatgtttctgggaagggtaatccagaaacctactgaggctcaccctactaggaatgtatttaccatttttcttttctttcatgtctgttcattgagaacacagagaatgtatttattcagtgactttctctctcctccacttcccaaccccagctacaaatggggacagcaagagagagaaaacctggggagaacggaagaaaccatgctttgtagaatggatcctgcttcagaattgctgatctcatcaaccacatgtttatagagagagcagtggcccttaaggaactggagagaatgctctgatttacttctgtccggcatggtgaacagcaggattggctgtagctgttctctttgccaaggacagatctgatctgattgccttgaggtgaaagtgaggtaaggtggggcggggattagcttttggctcccaagaatggttgttcatcaaccttttgctaagcccgtggttctcaaattttgctgcatgttagaatcacctgggaagctttaaaaaaacatctcagtacccaggttgtacctcagaccaattaaatctgaatgcctgggggcggttgccaggcatcagaagttttcaaagacctcccccaaccaggtggttcctggacatgtacccacgtccgggaaccactgtcctcagcatttattgtatgaggcaacttaggtgacacacaacaggtgagaacctggctcctgcctttcggacacaggacttaattttttttttattttttaaattatgcagtaaaattttttctgttggtgtacaggtctatgaatttttttatactgagtttttcatactgcctgagtacaatttaatggtataccataaagtataccataattttatggtataccgtaacattttacataccataattttatttttataaagtatacccacaattttatggtataccataaaactagtatagtataccacaaaatttacccttttaaattatacaattcaatgctcacttcagcagcacatatactaaaattggaatgatacaaagaaaattagcatgacccttgctcaaagatgacactgtaatttgtgaagtgttccatatttaaaaaaaaattttttttaaagtgtacaactcagccatatgcagtggttcccacctgtaatcccagggttttgaggccaggcacggtggctcacgcctatgatctcaacactttgggaggccgaggtgggtagatcacctgaggtcaggtgttcaagaccagactgtccaatatggtgaaacatcatctctactaaaaatacaaaaactagccgggcatggtggtgtgtgcttgtaatcccagctactcgggagcctgaggcgagagaatcgcttgaacccaggaggcggaggttgcagtgagccaagattgtgccactgctctccagcctgggtgacagagcaagactctgtctcaaaaaaaaaaaaaaaggctgggtgtggtggctcacacctgtaatccccagtactttgggaggccgaggcgggcagatcacctgaggtcaggatttccagaccagcctgaccaacatggtgaaaccccatctctactaaaaatacaaaattagccgggcatggtggcgcatgcctgtaatcccagctgctcaggaggctgaggcaggataattgcttgaacccgggaggtggaggttgcggtgagccaagatctcgccattgcacttcagcctaggcaagaagagtgaagctctgtctcaaaaaaaacaatcccagggttttgggatgcctaggcggaggctcacttgaggccaggagtttgagaccagcctgggcaatgcagcgagaccctgtctctaccaataaatgaatgaatgaataaataaataaataaataaataaataaataaataaataaataaaattagctggggatggtggcaagtgcctttaatcctagctgctcaggaggctgagacaggaggattgcttgagcccaagagtttggggttacagtgagctatgatcacgtcactacactctggctagggtgacagagaaagaccttgtctctaaaaaagagaggaaaacaagttaccaaattatacaattatctgttcagacctagatttacaagaaaaaaaatgtaaaatttcgtgtttttagtatatttgtaaagttgtgccaccatcaccagtaattccagaacatttttatctcgtctccccaaaataccccgaatccacagtagcttctccccatttccccttccgcccaccccctggcaaatacgagccatagagactctctccctctatggctttgcctactcttgatatgtcacataaatgaaatcacacaatctgtggccttttatgtcaagcttatttcacttagcatgctgttttcagggtttatctgtgttgtagcatgtattagtactacattcctttttattgatgaataatattccattgtatggatataccacatttcatttatctattcatcagctgatggacatttgggttgtttgcactttttggctattgtgaataatgcggctataaacattcttgtacaagtttttgtgtgaatgtatattttcattttcttggtcttggatacttttttttttttctgagacggagtcttgctctgtcgcctaggctggagtacagtggtgcaatctcggctcactgcaacctctgcctgctgagttcaagcaattctcctgcctcagccccccaagtagctgggattacagatgtgtaccaccacacccggctactttttatatttttattagagacagggttttgccatattggccagactgatcttgaactcctgacctcaagtgatctgcctgccttggcctcccaaagtgctgggattacaggcatgagccaccgaaaccgacccataaatctttttatataggtgtgatttcagcttaacattagtaaaaaaaaatttcataaatttcttttcatttgagctattttgcaatagaatgaatgactggctgcttcactgggactattaattctacaaatatttattgaatgcctactatatgccaagcattgtttttctcccatttggtgattatttatacttttatttttagtttacatgtaatgattgtacatatttatgggattcagattgatacttcttttttgtttgtttgtttgagacagtctcgccctgcctcccaggctggagtgcagtggtacaattatggctccctgcagccttgacctcccaggctcaagtgatcctcccacctcaaccccctgagtagttgggaccacagatgtgtgccaccatgcccaactaattaaaaaaaaatttggtagagacaaggtctcactatgttgcccaggctggtctccaactcccggggtcaagcaatcctcctgccttggcctcccaaagtgttgggatttcaggtttgagtgactgtacatgatgattatttcttttttaaaaaattatttttatttttttgtagagatgaggtcttgcatattgcccaggctgggcgaactcctggcctcaagcaatcttcttgtctcagtaattgtattgaaagtgacccattacaggcatgagccacctcgcctggctgttgaacatcttttcatgtgcctatctgccatcttaatattctctttggtgaagtatttgtttacatcttttgctcatttttaaagtcagtaatctgttttcttatttaggtatgagagttcattataaattctggtttttgtttgtttgtttttgttttgttttgtttttgagacagagttctgctcttgttgcccaggctggagtacaatggtgtaatcttggctcactgcaatctccgcctcccagattcaagtgattctcctgcctcagcctcttgagtagctgggattacaggcacccgccaccacgcccagttaatttttatatttttagtagagatggagttttgccatgttggccaggctggtctcaaactcctgacctcaggtgatccactctcctcgacctctcaaagtgctgggattacaggcatgagccaccgcgcctggcccattataaattctggatacaaatcctgtgttgcacatatgattcgtaaatattttctcttagtctgtgttttggacacaatactttttgtacatgtgtctgatgagagaaaggtatggaattaacatttactgagcacctactatgtgctggacgttgtagtggattgctggaggaatagggatataagtaagatagagtccctatcctcaagagaggtttcctggaggaggggtgaagtttggacactactgtctatactacaggcagaaatttttgtagagacggggtctcactatgttgtccaggctggtcttgagctcttgggctcaggcgatcctctgagccacaataaggtagaagagggaaatgtagagccaagtggttacaagtaaggactttggagtcagtttgtctggtcccagctgcagcacttaccacctgtatgtccttgggcaagttactaaatctctcagtacctcggtttcttcattagcaaaattagggcagtaataatgcccatggaagggctgggggtacgaaatgagagggtgtaggtggcaaagggaaactctccactcttatctactgtattatcatttatttgggtagcaacgttgttctgtggccatcaggggaagctaccctccacctcctggaggaggtgtcattggagctgaacctcaaggcctggaaagacttccagaagctgagatgggtgcattgaagtggtggaagctgctctttagaacctatattttgccccaaaccatatattcctccccaaagagagaagttttcctctttcttgttccatcccctcctctcttcatcctgcgctgtcctctcatcaagtctttttctttcttttccctgtctctccttctcacctgccagaggcttctatgggcccctcttgtgtccttggccttatgaagtcaccgacacttgggttatgggctgctgctctgaggctgcagggtcaccttcggcccctcgatggggactttacactctactccaaacagaagcaggatgctgtcttggggattctttccccctgcagtctggtgccctggtgccagtgctcagggaatgaatttagtgctgggtcacttccagtacaaattattgagcaattttctgtgtggacatcaggcctatgttgagacaacagctctgccagttcgagcttgttccgttaataatttactggcggagaaatgggagttaaatgagccaggaggcatattttgcatgaactttgagggtacctctgacagcagttcatgtaatttgtccgggaagatactaaagctgtctgaaatctaatgtcctgcctgccacactgaccctttggatccattttattaacacagttggctttgatttatgtttattttattgctttggtttctcttctgaactcataaccagagtggtggtgcatgtggaaaatggctctgtgaagaattaggttcccaggtgtgcttgtggaaggaaacctagcagcagctgtgggtttttctcggctttgcaggactgggatgtcttgtggcaaaactgcccctttctgagtgactggccactgtgtgtgtgcaaggccagcaccattgatgtgtgacctgtgcagttaagcagggccccatgtttagaaggaccccctgcttgatttaatgctctgctgtcaccatttaaacgtcttaataatttagaaacaaggagtcatccttttttttttttgaggcagagttttgctcttgtcgcccaggctggagcgcaatggcgcgatctcagctcactgcaacctctgcctcctgggttcaagcgattctccagcctcagcttcccaagtagctgggattacaggcacctgccaccacgcctggctaatttttgtatttttagtagagacggggtttcaccatgttggctgggctggtctcaaactcctgacctcaagtgatccacccacctcggcctctcaaagtgctgggattacaggcatgagccaccatgcctggctggattcatacattttatactggcccctgaaaattctgtaaccagccctgagtgtgtgccatggtccacattcccaattctttatgttgaacctaggtgattcgccaagtttattctgttctttctggggccatcccaaaatccttaaggaggctatggcaactctgtcccagtgtcttacaggcccaccagccaagatatctgaaaacacatacagataaaaagtttgcttaaaaaaaatcagttacggcctcttcccggccaccatcccatctaggaagtgaggagcgtctctgcccggccacccatcgtctgagatgtggggagcgcctctgccccgccgccccgtctgggatgtgaggagcgcttcggcccggccgcgaccccgtctgggaggtgaggagcgtctctgcccggccgccccgtctgagaagtgaggagaccctccacctggcaactgccccatctgagaacggcattccagatttttctgcagtccagaatagagcaccaccaccatagcatttcaagctcattctaagttcatcttatcaatgacaagaggagacacgttgttcattcatgtatgaggtagtactttccaattgaagacattgctttgaaagagactgccaaattggtttcattgagaaggaatgaaagaagctaaaaggctttcacctgagatttgacaatagccagaaaacctctgttaataatgaatgtttccctatctgcaaagtgaagatatgtttcaatgcttcaacgcataggaagtctgtagaacagtgcaaagaatatacaggcataccttgaagatattacagttttggttccagaccatcataaaaaggtggatattgcaataaggctggagtgcagtggcgtgatctcggctcgcacaacctccacctcccagccgcctgccttggccccccaaagtgccgagattgcagcctctgcccggccgccaccccgtctgggaagtgaggagcgtctctgcctagccgcccatcgtctgggatgtgaggagcccctctgcctggctgcccagtctggaaaatgaggagcgtctctgcccggccgccatcccatataggaagtgaggagggcctcttcccgacagccatcccatctaggaagtgaggagcgtctctgcccggccgcccatcgtctgagatgtgggtagcacctctgccccgccaccccgtccgggatgtgaggagcgcctctacccggccgcgaccctgtctgggaggtgaggagcgtctctgcccggccgccccgtctgagaagtgaggagaccctccgcctgacaaccgccccgtctgagaagtgaggagcccctccacccggcagcctccccgtcagagaagtgaggagcccctccgcccggcagccaccccgtctgggaagtgaggagcgtctccgcccggcagccaccccgtccgggagggaggtgggggggtcagccagccgccccgtccaggagggaggtgggcgggtcagccccctgcccggccggccgacccgtccaggagggaagtgggggggtcagccccccgcccggccagccgccccgtccgggaggtgaggggcgcctctgcccggccgcccctactgggaagtgaggagctcctctgcccggccagccgccccgtccgggagggaggtgggggggtcagccccccgcccggccagccgccccgtccgggagggaggtgggggggtcagccccccgcctggccagcctccccgtccgggaggtgaggggcgcctctgcctggccgcccctactgggaagtgaggagcccctctgcccggccagcccccccgtccgggagggaggtgggggggtcagctccccgcccggccagccgccccgtccgggagggaggtgggggggtcagccccccgcccggccagccgccccgtccgggagggaggtgggggggtcagccccccgcctggccagcctccccatccgggaggtgaggggcgcctctgcctggccgcccctactgggaagtgaggagcccctctgcccggccgccaccccgtctgggaggtgtgcccagcagctcattgagaacgggccatgatgacaatggcggttttgtggaacggaaagtggggaaaggtggggaaaagactgagaggttggatggttgccgtgtctgtgtagaaagaggtagacatgggagacttctcattttgttctgtactaagaaaaattattctgccttgggatcctgttgatctgtgaccttacccccaaccctgtgctctctgaaacatgtgctgtgtccactcagggttaaatggattaagggcggtgcaagatgtgctttgttaaacagatgcttgaaggcagcatgctcgttaaaagtcatcaccactccctaatctcaagtaccccgggacacaaacactgcggaaggccgcagggtcctctgcctaggaaaaccagagacctttgttcacttgtttatctgctgaccttccctccactattgtcctatgaccctgccaaatccccctctgcgagaaacacccaagaatgatcaataaaaaaaaataaaaaagaaaaaaaaaaaaaaaagaaactatccaatcctcagcctgctcggctgcttactctgtttcacccatgccttctgtgaaaacaacagtaaaggttttgcccagggaaaaaaaaaaaaaatcagttactgctcggttcagtggctcacgcctataatcccagcactttgggaggccaaggagggtataaagaacgtggctgtgtgttggtcaaggataggccgaggtaggatgtttacatcctgcataactcgcaggtgtataactctacatattatcacagccatatagccataacatgggaaagccctcccttggccctacgccactatggtctgtaaaggtataattgccctgctgacactgtacaggtgctcacacccagagaaagagagagagtcaaagctgtccatcttgagatggacaggagggagccaggacacagctcagctcgctcgtgcccagagagagaaagagttaagccgctaaccctgaaggcaagggagagccagctgtgtgcagctgcgtgtgagagccgttgtactaagcagctgagacagggaggatagtgtgagaaagttgttaatgaaagttgctgctgaataaaataatctttcacctgcctacggcctcctgagtattctttctgctcatccacccacttccctcagacctcagcatgacaattggcgtagtcatagacctaacagcgggcagatcacttgaactcaggagttcgagaccagcctgtccaagatggtgaaaccccatctctatcaaaaagatacaaaaattagccaggcatggtggtgtgcgcctgtagtcccagctactcaggaggctgaggtgagaggatcacttgaacccgggaggcaaaagttgcagtgagctgagattgtactactgcactccagcctgggcaagagagtccctgtctcaaaaaaacaaaaaaaacaaaaaaaacaaaaaaaaaaagaaaagaaaaaaaatcagttaagtatagatatatttcaaaattcaaaaagtacagaaggccagcctgggcaacatggaaaaccccctactctacaaaaaatacaaaaattagctgggcatgggggtgcgcacctgtagtccctacttgggaagctgaggtgggaggatcacctgagcccagaggttgaggctgcagtgagccgagattgcgccattgcactccagcctgggtgtaggttaatacttccctattattccctagttttctttttctttatttttatttttatttatttatttatttatttatttatttatttatttatttatttatttttgagacggagtttcgctcttgttgcccaggctggggtgcaatagtgcaatctcggctcactgcagcctctgcctcctgggttcaagtgattctcctgcctcagcctcccgagtagctgggattacaggcatacgccaccacgcccagctaattttgtatttttagtagagacagggtttctccatgtttgtcaggctgatctcaaactcctgacctcaggtgatctgcctgcctcgggctcccaaagtgctgggattacaggtgtgaaccaccgcacccggcctattccctagttttcttgttccctttctgcagaagcaagcactgctacccatctctgagcatcttgcagaaagtctatgctttgatgaaatatatgtacatatctccatatttattgttctttaccagatggtgggataagttgtacactattttgaaccttcctcttttcacctaactatgcattttggaaagaattccaagtcatcatataaatctatctcattatttctttggtaacaatttcctgttgtttggatttaccataattcacttcacaggtcccctattgatggacacttaggttattgcctaacctttccttctataaacaatgctcttagaataggcttgccagattgagcaaattaaaatacaagctgcccagtgttgaatttgagattcgatttttttatttgaaatttcaattttgaatttgaaatgcagataacaaggaacacagtagaacccccttatccatagtttcactttctgggatttcagttacacatggtcagctgcagtctgaaaacattaaatggaaaattccagaaataaacaactcataatttttaaattacatgctgttctgactagtgtgatgaaatctcacaccttcccactgtggcctgcctgggacttaagtcacccctttgtccaatgtatccatgctgtatatgctctttgcctgtttgtcactttttgtagctgtctaggttatcagattgactatttcagtattgcagtgcttgtgttcaaataacccttattttacttaataatgaccccaaagtgcaagagtagtgatgctggcttattgtcataattgttctattttattattgttgttgctaatctctcttactgtacctaatttagaaattaaactttatcataggtgtatgtgtggggaaaaaaacatagtatatagagggtttgctactatctgcagtttcaggcatttacttggggtcttggaaagcatccccccacgataacaggggactactgtaattccttagtataaacacgtttcatacttatgacccaaaagggtaggatatttgaggaatagtaatactaaacaaaatgttgctgtttatctgaaatccaaatttaatagagagacctgtattttatctgacaaccctatcctagaacaaagcctggtacatagtaggggctcagtaaaaatttattgaggcagagtgctgtggctcaaaacctttgggcactttgggaggctgaagtgggggaactgcttgagcctaggagttcgagaccagcctgggcaacaaagcgaggctcatctctatacaaaattaaaaaaaaaaaaaattagccggatatgctggcatatgcctgtagtcccagctactttggaggctgaggtgggaggatcgcttgaactcaggagtttgaggctgcagtgaactatgattgtgcaactgcactccagcttgggcaacagagaccctgtctctagaaaaaaagaaaaaaatgaatgaatgaataaatgatccctctcctgaatgaaagcccgtgagggcagctactttgttatgtcctctgcgctttcttcaatgtttcttaggcatttgttcaatacctggacaaatgctgtagtgaatgtcttcatgaacgcttcatttggcccacgagagaatatgtttgtagaataaattcatttgtttgaatgcctgatggattctgcctaattgcccctccacaggcctccaacacttcttagccaagttgtccaattgtattcctgctgtcacctaaagtcatttaacctttggggaacttcctccctgaggctgccctaaatggggttaggaaaggagctgaaagtgccaaccccattataccacccctttatgccccttccgtcaatccacacgaggaaatgaggaattttagatgcaaatggcaggacataacatctggctcatcagagccccagactgtcttgtccccagaggtgctgaggagcccagtgggctctgccagctcctaatgatatatggttcacatgggttgagccatcccagaggctcactcggttcattgtccacctgcttccagtcttacaatctgtcaccagcacaggacgatttaatcatcctaatgaggctgtcactgacagcatgctccaccacctcacaagggaaagtcggttctgcctcttcccccagccaatctaagcacatgtggtctctgtttgccaaccacagagatgtgggtggaggagcagctgaggttacatggagcagaggggacacagggttcagccttttgaactaggaattgagaagcttggatccgatccctatttcaccacttcctgtattagcttgatgaccttggacaagttacttaccctctctgagtatcagtttcctctgtatattgtccagtgtacagcatggatacactggacaaaggggtgacttaagtcccaggcaggacacagcgggaaggtgtgagatttcatcatgctattcagaacaggatgtaatttaaaaattatgagttgtttatttctggaatattccatttattttactacatttatttctgtagtaaaatggggctaatagccctgaactattttctcatgggttcatcatgaagttaaatcaataacttaaggaggaaaaggatgtataaattatgaagcattctataaatatagaatactttagggttgagagtgtggatggcagacggtcttaatcagcttccaagctattgctattattatttgtactagtgtggcttcaaaatttctatccagtagggcataaagggtgaaaacatgtagggtaggaggggggcttgccctttaccaaagactggggaacagtcagtatcaatcaatagcacccatcaaagtcagggagcaggggtggctgattacaggacgggggaaagcctctctaaaccatcttttggggaccccattgtctcttcccaggactaggcattggggtcctgctctactggggtcctctttctctatgtagaagcctctctcgaagctgttcatggaaacagaagataataaccccattagcttctgaaaacctgctattctaagaaggcagctgtccaacctaatttaagatggggcttctcctacattctcttgcactttaagaagccagtttctcagcacccttggggaagggagagccttcccagaagtggctgggaagcagaggaagtgctgagccctagggcgagggagggtgggtcattcttacatcagtgaatgttgaagagaaggccctgacccaccccgttctgcctgccagctctggggtgtggctctgaactcccttttccctctaaagtaaatggaaaggtggcaattcacagttgtgtgtgtgtgtgtgtgtgtgtgtgtgtgtgtgtgtgtgcgagagagagagagagagagagagagagagagagagacagacagacagacagagagagagagagacagagagagagagagagagagagagatgcaaaaggcatcagtgacctggcctagaggggcccctttctgggagtaccactgagttttatcactgtgtgaaatgccagcaagctgcaaatgaagaataactttcaacatgtcctttcagtgtaaattacccccaaaagcattatgttacacctttgcagggtggctgctggctgccctgtggagatgcctttgccagttgttggccctcacacccagaggtggaaaatacacaagacttgaaatgggtttgtctaggctgcttagggggtgggaggaattccctaagtggagaaaacaaacagacctaacgaaagcagatcaaaacccagcttaccacacattgttccgcacctgggggcagaaaaaaaatcagagctctaacaaagcagggaagtgagaggtggtgttgggatgctggaaaaatttagtatacctattatagcacgtggctgggtgcctctactctctccagaaagggaaaggtaatgcacccagcagaggaagcctctgtagtttggagagggatgactggctcccaacatggcaggcagtagcacaccagtgtctcctcaccagcactctcacttccctgggagtttgggattagagaactgttctgttcctttcagggtcctgtcccaggcacaggaactaggtaagtagaaggaagtgaaagctttcctcctccccggtgccctagatcctcctgtccaactaccgtttgaaagtttggggacctggggcaggagcagtggctcatgcctgtaatcccagcactttgggaggccgaggcaggagaattgcttgagttcaggagttcaagaccagcctcagcgacatagcaagaccttgtctctataaaaaaataaaaataaattatccaggtgtggtggtgtgtgcctgtagtctcagctactagggaggctgaggcaggaagcatcactcgggagatcaaggctgtagtgagctatgctcatcctactgcactccagcctaggtgacagagtgagactctgtatcaaaataaataaataaataaataataaaagggggcaggtgcagtggcttatgcctataacaccagcactttgggaggccgaggtgggcagatcacaaggtcaggagtttaagaccggcctggccaatatggtgaaaccccgtctctactaaaaatacaaaaattagccgggtgtggtggcgggtgcctgtagtcccagctactggggaggctgaggcaggagaatcacttgaactgggaggcagaggttgcagtgagccaagatcacgtcactgcactccatcccgggtgacagcgagactccgtctcaaaaaaaaaaaaaaaaagttcgggggacctgagaattttttcacaaagtatgagttccgcgaagctttgcttcagctccactagcctctttttttttttttttttttttttttgagatggagtctcgctctgtcatccaggctagagtgcagtggcgtgatcttggctcactgcaatctccacctcctaggttcaagcaattctcctgcctcagcctcctgagtagctgggattataggcatgcgccaccacacccggctaatttttgtatttttagaagagacggggtttcacctgttggccaggctggtctcaaactcctgacctcaagtgatctgcccacctcggcctcccaaagtgctgggattataggtgtgagccactgcaccccgcccactagcctcctttctattcctggaagctgccttcctgcctcagggcctttgtacctgctgttctccttaccaggctcttggagaggctccaccttcagctaaagttcctttctcaaagaagcatcccctgcccactgcttctaaaataggattcccacctccaaccccacaacaactgtcatctctaggagctgaaacataataaggtccagtgagcagggatctctgtcaggctttgctcattgatgtgtctccaatatctagcacagtacctggcccattgttgatgctcactacagcttatttgaatgaatgttggatgaatgaatgaatgaatgaatagccataaccattattgctattgtcagggctcagaaagtgatacccccaaaatatggcactttggcatgctgagtgctttgaattaaaggagactggaaggcctcagaggcaaagtctgtctgactttctcctgccctcctgtcttccactcctttttctcccctgaagtggagaatttctcttcccgatggcagctcatagaagctagaacccctctctcccaaagtaagacataaaacttagaaaggtcactctcttccttctccctggaaaaccctcattccagaggggtcctgtctcatacgaattggggagggaagggggaaggaatgctacacagagaggccaggaagaatctgaatggatggatcttgctgggttttctccctcagtctattgccattagatcatactcttttctttctttctttcttttttgagaaagtgtctcactttattgcccaggttagagtgcagtgacacaatcatggctcgctacagcctcaacttcccggacttaagcaatcctcccacctaagccccctgagtagttgggactacaggcacacaccaccatgcttagctaattaattgttttttttgtttttttgtttttgtagagaccagagtctcactatgttgcccaggctggtcttgaattcctgggcttaagcaatccccctgcctcagcctcccagaatactgggattacagacatgagctactactcctggctagatcatatccttttgtgcaatcacttctacatggctatccattcttcatagaatcttaagtgtcaaaatagttttccctgggtctattggtcattatttctgaaggcaaccatatcatgtaaaactttgattaaattcatctgctatccttttctcttgttaatctgtcttttgttttgagtgtcagccatggcccttatgatagaagatgaggaaaggtatcacacctttccgccccatactatcaaacaccatcctgtttacttattgatttgtggccagattgaaagctctatgagagcagagatatttctgtcttgttttccaatgcttatcatcagtgcctgcaagaagagtgcctgaaacataaaaaattctcagtgtttgttgaatgtatggtcctgttcagggaccatgtttgtcacagacagatgtgtccagattaaagagaatatcctctttagaaaaaaggaagaaaatgctgatgcacagatagattgggttgtggtagagctattcccattaatccagaatcattttctatactacagcatggatttacggtttctttggctaaattttttttttttaaaagcttatatatgtttgggaatagacgaagttccagataatggatttttctgtttaaaggagggctaacaaaaatctctttttttagaccaggcccagtggctcacgcccataatcccaacactttgggactctgaggcaggtggatcacctgaggtcaggagttcgagaccagcctggccaacgtggcaaaatcccatctgtactaaaaatacaaaaattagctgggtgtggtggcaggcacctgtaatcgcaactagttgggaggctgaggcaggagaatctcttgaactcaggaggcagaggttgcagtgagccgagatgacgccattgcactccagcctgggcaacaagagcaaaactccatcaaacaacaacaacaacaaaaaacaacaacaacaaaaaaccctctttttttagaatgcttcttgtaaatttttatttatttttattttttatttttttgagacagcatcttgctgtcacccaggctggagtgcagtggtgcaatcagggcttactgcatgcagcttcgacctcccaagctcaagtgatcctctcagctcaacctcctgagtagctgggactacatatctggctaattagaatttttttttttttggtaaagatgaggttttttttattattatacttcaagttttagggtacatgtgcacaatgtgcaggtttgttacatatgtatacatctgccatattggtgtgctgcatccattaactcgtcatttacattaggtatatctcctaatgctctccctccccactcccccaaccccacaacaggccccagtgtgtgatgttccccttcctgtgtccatgtgttctcattgttcaattcccacctatgagtgagaacatgtggtgtttggttttttgtccttgcgatagtttgctgagaatgatggtttccagcttcatccatgtccctacaaaggacatgaactcatcattttttatggctgcatagtattccatggtgtatatgtgccacattttcttaatccagtctatcattgttggacatttggcttggttccaagtctttgctattgtgagtagtgccacaataaacgtaaagatgaggtttaactttgtcgcccaaattgttgttctcaagctcctggcctcaagcgatcaaagtactgggattatagatgtgagccacctggcctggcctactgtaaatttttttctttctttttttttttttgagatggagtttcactcttgttgcccaggctggagtgcaatagcccgatctcggctcatcacaacctctgcctcctgggttcaagagattctcccgtctcagcctcccaagtagctgggattacaggcatgcgccaccacatctggctaatttttttgtatttttagtagagatggggtttctccatgttggttaggctggtcttgaactcctgacctcaggtgatctgcccgccttggcctcctaaagtgctgggattacaagcataagccaccatgcccggcctattgtaaatctttctacattgtcctggcccatgattctagaagagtgtagtaaggatgatgggatggatactttttgattcagtatcaaggggtttgtttcggagtgattatgttcagcatcagcaatgatatacatgacagcaaatgtatgtaagtgatttgggctaaaaccatagcaacacttaagactaagcctggactttacatttggggagaacaaactattggcttgttctgcttttgtacttccagttaaaagggaagtactaaaataaaaaaatatatatttttggttaaaaatacaaaaaaaaaaagccaggcatggtgacaggagcctgtagttccagctattcgggaggctgaggcaggagaatggtgtgaacccaaaaggcggagcttgcagtgagcagagatcgtgccactaatacagtccagcctgggcatcagagcaagactctacctcaaaaaaaaaaaaaaaaaaaaagatacacgttagaatgtgtctggtcaacagagattttatttatttattttttttaagagacagggtttcagccgggcacagtggctcacacctgtaatcccaacactttgggaggctgaggtgggtggatcacctgaggtcaggagtttgaggccagcctaaccgacatggtgaaaccaagtctctactaaaaatacaaacattagctgggcatggtgtcgggcgcctgtaatcccaactactcaggaggctgaggcaggagaatcgcttgaacctaggaggcggagtttgcaatgagcagagaccacactattgcactccagcctgggcaataaaagcgaaattctgcctccaaaaaaaaaaaaaaaaaaagagagagagagagagagacagggtctcactctgtaacccaagctggagtgcagtagcatgatcacaactcactgcaggcttgaactcttggcctgaagcaatcctcccacctcagcctccagagtagctgggattattggtgtgagccacttcacccagctaataacagggattttattgtacattcagattgtgctttgatattacacaactttgaatcagtaatagtgggtgacatatgtcatgcagatactatgtcccagacaatatcctgagctgtgtttacatttattaactcatttaattctcataacaatcctgtgtaggtacttgtattatctccattttacaaatgagaaaactgaggctcagggaagttaagtaatttgtccaagtttacacagttaggaaacagcagagtcagaatttgaatccaggaaggcaggactaggtggggtgggggcagagctcggacactggactcctccacagctctgcctccttcagccaccacgtcccaaaaaaaaaaaagaatttgaatccagtttccagagcctacattatgctcttctgcctatggtgaccaacttgtcccagtttgcacaagacttccctgatttgggcattgaagatcctgtgtcctgggaacccagtcagtcctaggcaacccaagatggttggttactttggtctttcaaatacagctcttcaacgtcagctgtttgtaaataaagtcataattacctctagcctgtgtgacattcagttcgccgatcactaatgcaagataagggggttgtgaaaatgaccttgttaggctcttgctattaaagtaatatttggaaataacatatggataatatacggaaaaaatatgtgcagaggacaaaaacaggagccatggaaaatatttccaaatgaataataaatagtgactgagaaataggattggcaaagaactggctgtgagggaggaaaggacagttggaaataccagaaataatgatggtgatggcggtgtcatctctaacactggctgagtgttatgtgctaagttctgtccaatcacttcaccagcgttaacacatttaatcctcaggcagcatgtgagataagcactacctactattatcttactgtgcaggtgacacaattgaggctcaaagaagttaggttaggcaaatccttttagcagcaaaggaagcggccagcctcagcaggggattacttgagacagcgcctggtgctggggctgggtgcggtcgcttacacctgtaatcccaacactttgggaggccgaggcaggtggatcacctaaggtcaggagttcgagaccagcctggtcaacatgatgaaaccccgtctttactaaaaatacaaaaaattagccaggcgtggtggcgagcgcctataatcccagctactctggaggatgaggcagaagaattgcttgaacccaggaggcagagattgcagtcagctgagatcccaccactgtactccagcctgggcaacaacagcaaaactccatctcaaaaaaaaaaaaaaaaaaaagagaaaaggcatcagaaaaagggatgtggactcaagtttgttcttggctcaaaaagctttttcaaaatgttgcctgcttgcaattttcccagaatttctgaagacagacacattttttctagccctgtaatcttctcagatttgagctggaaatcagaataaggactgagtactgcccctttcactcaccaaacagattacttccctgcaatcagtaaacaacttcttcttcttctccttctccttcttcttctttttttgatggagtcttgctgcaatgccccggctggagtgcagtggcaccatctcggctcactgcaatctctgcttcccgggttcaagtgattctcttgcctcagcctcctgagtagctgggactgcaagcatgtgccaccatgcccagctaatttttgtatttttagtggagacagaggtttcaccatattggccactccaactcctgagctcaagtgatccgcccacctcggcctcctaaagtgcagggattacaggtgtgaggcaccatgcccagcccaataaacatcttttgcctgcagagcttgccacgtgttccaggtttttctgagttagtaggagtcaggcatctcctgagtgacttggccagacaagtggatgttaatgagtgactgatgagaaaacatgggaacaattgcccctgctggatgtcccagtgtgcaggagaagctgtgctgatatctgtgctcaggactctttggaatgccattatgattttatgcaccaaggtgtattattgtattgtaagggtttcggttacccttaagggcttgcaattaattttcatttgtcctagtcttttacaagagggttacaaatggctcctttcctagtgttctacaaaagtctttccttttaaaatagtgccctatgacacagacacgtggtcctagagcttgtgtaattttttttttttttttttagacggagtctcgctctgtgcagtggccagatctcggctcactgcaagctccgcctcccgggttcatgccattctcctgcctcagcctccccagtaactgggactacaggtgcctgccaccatacctggctaattttttgtatttttagtagagatggggtttcaccgtgttagccaggatggtcttgatctcctgacctcgtgatccgcccgcctcagcctcccaaagtgctgggattacaggtgtgagccaccgcgcccggccgagcctgtgtaattttaggctggagtcctgctagcactggaaagctttgccctcattataaatggtcaacttggccttctgatttctaagttcatctcctgatgattttggcaagtatcaataaattatctggagactgcttaccaacgtagggggactgacatgatttaaaatccagtgtcttcacttgaggtttgagtgatcaaccaaagtttagctgtcctaagaagccctgcttcaaaatcctttcctggccgggcgtggtggctcaagcctgtaatgccagcacttgaggggaccaaggctggaggattgcttaagctcggaagtttgagactggcctgggcaacatagtgaggctctgtctctacaaaagatacaaaaaatcctttccagcatgttctcatctttcctggtacttgttcttggtggatgttctaagaatgtctattaaatgaattaattgccattatgtgatttacctcctctctagattataaaaagaaggcttttcccagacaggcacagtggtgcacacctgtaatcccagcactttgggaggccaaggcgggcggatcacttgagcccaggagttcgagaccagcctgggcaaaatagtgagaccttacaaaaaaaaaaaaaaaattagtcaggtgtggtggtgcacacctgtagtctgtagtctcaggtactccagaggctgaagtgggaggattgcttgagcccaggaggcaagggttgcagtgcactccaaccaccactgcactccaacttgggtggcagcgtaagactctgtctcaaaaaaaaaagaagacttttctgggaggttgcacttagccatgattgtgccactgcactccagcctaggcaacagagcaagacccttgtctcaaaaaaaaaaaaaaaaaaaaaaaagaagaaggcttttcgccactgttgaatcttccacagcacctcgcacatactgggtgctcagttgcttttctcatttgcttgcttgcttgtatgaccaaatgcctccagccaccctgtgacctgggatacacttgagttctcatttttcccaaagctgacagggatcccaggctggtcttggttgacctggaagagtctgtccaaaggaggaaattatctccccatgaggattattctatttatttcctcaggattgggtctggttggaatccagccaggaactcagatggtccaagacagatttgagttagatattcacacccagctgattctgcctgcccagggaacaggagcatctgtcaggtgccaggaaagtcaatgacagatgtctccccgtgggtgcagcgagagcttctgcaacttcagccgagggagattccccaagtgacagcactgcctccgcccccacttacattttgatctaatttctgcatgtgatatcggaactgatattcttttggtgggaagggaataaagcaaggacaggcctgaatcatcttcatgtgctcatcaggagaaatcatgtttttctactgctgggattgcctactaatagaagggcagggttttcccctccatgggtttcaggcaatggaatgtcctgctgcctcctcaaattagcttcaaataccactgggagcagcaaagggagactgggccacgtgtctggttcataaattacttgctagctcctgtggtattcatttttttttttttcttgagcgtttttgtgctcgagccatcggtttctgatacagcttgcttgagaatcaagatatttcaatgctggaagatctaataatttcaagggccagcaagcatttatttgaagaattttctgcagggctggcaggcatgagaaagcctctttcatgcagtggggaattaaggtctctgaacttgcagtccacgaattcaagaagcggatagaaatgctcacagtttgggatgtagctttgtgtagtgtggcccagggcgagataatccaagtttaagtgcctcctctgcccccttattagctgtgtcacactggatgagtcacttcatgccactgagccacatttgttcatgcatcatatggtcactgagcatccaaaccgcatggaatggaggaaggagtttactgagcatctgctctgccctggcactgtggcaactgttttttcatagttttcttttctgtaaaatgtagttgatactatacctgctctttgtccctccaggattgccataagactcaaaacaagacaacatgggaaagtatattgggagcagcaaagaatataaccatgtagaggcctgttacctttgccttaattcagattttccacattctcttactctttcaagtatgtacaagcttgcctgggtgtggctttgtgcggctgattattcaccataccccatctaagttcggtgtagacacacagctgggagtgtagtatttccttctgaacccatgcccctagatgcatgtgtcatcttgaaatgtacaacaccagtgaggacaccagcttcccacattctgtagaagattgaggctaaagtgggtatgagtcacgtgaagttgaagggctgggtttggtacctttgtgctgttgattcccatgttgtcagggataagatctgagtgattagatgaaacttggtctcctgcagcgaaaacagcatgggctcaggagtcagacttacccatccaggcctctttgctctgccagttactagttatataaagatggcttgactcagcttgggcaaaaaggagaatgtagtggtaggatcgtagggcatctagaataagggataactggaatgaggactaaaatgtctccaggatactttctcctggttttgtttgttcccctccccacatgttggctttattctttcagtccagctttttccccagagaggggatcatggcttttggtatctctcgtatctcatggatctagcttcactatcaaagaaggcctggtttcttccctcaattccagtttcaaaaatcctgggactgagtgtggtggtttttccttgtgattccagtgctttgggagaccgaggtgggagggttgcttgagcccaggagtccaaggctgcagtgagctgtgatcatgccgctgcactccagcctgggtgacacagtgagtccctgtctcaaaaacaaaacaaaacataggccgggcacggtggctcacgcctgcaatcccagcactttgggaggccaaggtgggcagatcacgaggtcaggagatcgagaccatcctggctaacacagtgaaaccctgtctctactaaaaatacaaaaaattaacagggcgtggtggcaggcgcctgtagtcccagctactcgggaggctgaggcaagagaatggtgtggacccaggaggcggagcttgcagtgagctgagatcgtgccactgcactccagcctgggcgacagagcgagactccatctcaaaaacaacaacaacaacaaaacaaaaacaacaaaaaaaagcaaaaacaaaaacaaaaacaaatcaaacttatctgaataatattattacagaactgaaaaaaaaaaaacccaaaaatactactgtaagtatataagaacataattgaatgtgaaattgttctgttttatgtaaattatgtttaaagctaataaaggggaaatgtagaaaattataaagaatttaagaaataaggccgggcacagtggctcacgcctgtaatcccagcactttgggaggccgaggcgggcggatcacgaggtcaggagatcaagaccatcctggctaacatggtgaaaccccatctctactaaaaaaaatacaaaaacttagctgggcatggtggcaggtgtctgtagtcccagctacttgggaggctgaggcaggagaatggcgtgaacccgggaggtggagattgcagtgagccgagattggccactgcactccagcctgggcgacagagcaagactttgtctcaaaaaaaaaaaaaaaaagagataaatcaggaatttcaagctatcataaaccaatacattaaaatagatatcattatgtatgcaatttataatatataagaatatgtgcaattaatcattttcttttatatttatggaaatagctgaatgacatccaaagagcatatttctctatgttccggaggaagaaagttatcataagcagaaattataatagctttgagcactgtctcttaagtggccaaggtaacagtttcttgatcacaaacccagctggcatttacaggtactgtgaaagactagatcaggccttggcaactgagggcaatatggctcttagaaagaactgaaggatatagttcaaggcttaaaccagctctgctcaaatttgcctctcaaaagcaaccaaaattgaggccccatcatttgaggtctggccaaatggccttgctgcctgtctctccacctccctgtatcttcttgtagttcctatctacttttagggtcgtggtaataatggtcaaagtatctagtcacatgcctaagtaggtactcaaaaaatactgctttactttctttctccaatggctccacacatcttttaaaaaaaaatcatgagcacacaaacaaggttggctatagacatttcattgtaagagccagctacgtggctcaaatattggctgtgttaccctctgatttgtttaaaattcacccagggatcccacaattattctcaatttgatctgagcaagcacaattggaaatatatcttagtattctaaatgccttcctggcccataaggaatcaggcaggctacagcatgtttggataaagattcacatctaacccatgaacatatataaaatgcttatatcagttatcttgtgttacacagacacagcgacaaaattatagtgtatggtatgccaaaggctcaaaatagcaggatggttatttaaattgtagtttagaattcctcaaatcactaccttttcctaagaagtccatatccttatgacattgtaagcccaataaagaaaggaggaaatatagtgtctatcatctgaatgtgcagactccatcatatggcagaacatttgtaactagccacgtggcttggggcaaaccactttatttcttcaatctgaaaaacacttgctttgcatacctacctcatacaaggctttgagatggacttctgagggatgactcagacatgcctttaaagagaagggcctactgggtatggactttcagtagagttaagtacagaatctgcaatagttctagaagcagaatgggatattcaggaatggggataagcaagtggtctgatttggttgaaggatatggggcatgcagagagtgcaggggactaaggttgttggggggctatttattggatgtagaggtcataagaggggaggtatcacagatttggagcctaggtgacttggaaaatgggttgcccttttttaatttaatttttttttttttttttgagatggagtctcgctctgtcgcgcaggctggagtgcagtgacgccatctcggttcactgcaacctcctcctcccggattcaagtgattctcctgcctcagcctccagagtagctgggattacagggacccaccaccacacctggctaatttttgtatttttagtaaagacggggtttcaccatgttggccagattggtcttgaactcctgatctcaggtggtccgcccacctcagccttccaaagtgctgagattacaggcatgagccaccgcacccagccaactttggttttaaatgtacgtcctaggttttaagattctagttggacattcagctggagagtccagaaggtagctgaaatgtgggattggatcttgggagtgtttcggtggacatatagatctgagagctgctgaaagtgaaagttgaacctgattgggtctacttactaggatgtaggttcaggtaatgcagtcatgataccctattaatggtaggcttaaaccagacagagggtttttttttctctctctctttttttttcttctttttttttttttttgagacgaagtctcactctgtcgcccaggctggagtgcagtggcgcgatctctgctcactgcaacctctgcctcctgggttcaagcaattctctgcctcagcctcccgagtagctgggattacaggtgctcaccaccacatctggctaatttttgtgtttttagtagagacggggtttcaccatcttggccaggatggtcttgaactcctgacctcgtgatccacccgccttgggctcccaacgtgctgggattacaggtatgagccaccgcgcctggccttttttttctttttcacataattcaagagtaagcagtctagggttggtgtggtggctctgggacgtcagcgactcaggtttctcctatctttttgctccaccaagcccagggtcatgcctttgctcacattgtccaagatggcttaacactactgtaactgtacttccaggcagtgggaaggagaaaacgagttaaaagtatgacctggatgtactgtaggactagaaccctggtctttagctaaactcatgctagacccacaataaagattacatttccagtctcccgtacagataagtggccaatcagaggtgagccaaatacacatgagcaacttctagatccattctacaaacatcttttgaatatcactatgtccttccatactgagtcacagagaacagtgctgtgaaagccaaaggaaaggagagcgcttgcttcagcagcacatttactaaaattggaaccatacaggaagattagcatgtcccctgtgcaaggatgatgtgcaaattcgtgaaatgttccatatttttttaaaaagtccaggcacagtggctcatgcctgtgctcccagcactttgggaggctgaggttcaagaccagcctgggcaacatagcaagacctcatctctataaaaaaatttttttaataacgagaggcttctgaaaggggtttcacagtgttacagacagatcaaggaggaggagaactgaagacacgagggcagtgcttctcaaccagggcctattttgccacttccaggggacatctggccatgtctggagacatttttggtttgtgatgactgtgaaaggaaatgtgtgtgcttctatcatctagaaattagaggacacaggtgctgctaaacactctgcaatgcataggaaaacccccaacaacaaagaataatcctggcccaaaatagcaattgtgctgaggttgaaaaaccctgcactaggagattaggacaggctgggcctgatggctcacgcctgtaatcccagtattttgggaggctgaggccggcagatcacttcaggtccggagatcgagaccagcctggccaacatggtgaaaacccgtctctactaaaaacacaaaaattagccgggcgtggtggcatgtacctgtaatcccagctactagggaggctgaggcaggagaatcacttgaactcgtgaggcagaggttacagtgagccaagatcacaccactgcactccagcctgggcaaaagagctagactctgtcaaaaaaaaaaaaaaaaaagtcctgaagcccaggtcacacccaggccaattaattcagactatctcagggtgggactcaggcaccaggattttaaaaaaataccaagtgattccaatgcacagcaaagtttgagaactatgggatcaggaggtaactggtaaactctctgagacagaagttttgacaattactggcgtacagagggttcttgacaactatctgttgagtgagcgaatacataaatgaataacaccactaggatagaagcaaatggtcagtggttgaggaaataagttggaagtggaggttgggggagagctttaagtacagattactcttccctaaactctggttgtatcaggaaaaagagaaggggtagcacattgagggagaagcagatacggaaaagattttctgtatttttattttattttattttattatgagacagagtctcactctgtcacccaggctggagtgcagtggcacaatcacagctcactgcagcctcaccctcccgggctcagatgatcctcccacctcagactcctgagtagctaggactacaggtgcccaccaccacacccagctaattttcgtatttcttatagagatgggatttcaccatgttgccttggctggtctggaactcctgtactcaagcgattcacctgcttcagcctcccaaagtgctaggattacatgcgtgagccactgtgcccagctgggaaaagattttctatttttaggttgatgcagaattgagcatgtttgtgggaagagggtaagaagtaaggagagagaaaaagggtaagaacatgagggatgagaggagtcatcagtggagggggatgagatgaggcatgtgctttctgcaggggaagagatgttcctagagacagaaggtaaagatatggactaattctaagataaaggtgatggcaggggtgggggtggggtcttgaatgacctccatcttccctgtaagtagaaaatgaggtcttataataagtgtggcaggggtggattttgggcttaagggagttgagaagtcttaggcaacactgtatagaaagccaccgtcaaaaagagcccaggccaggcgccgtggctcatgcctgtaatcccagcattttgggaggccgaggcggctgtatcacctgtggtcagaagttcaaaaccagcctggccagcatggtgaaaccccctctctaccaaaaatacaaaaaattagccaggcatggtggcgggcgcctgtaatactaggtactcgggaggctgaggcaggagaatcacttgaacctgggaggcggaggttgcagtgagccagttgcagcgagctgagatcacaccattgcactccagcctgggcagcaagagggaaactccatctaaaaaaaaaaaaaagcccaaatgaagcccaggtgaggtttggaattgtgaatctatactgggtcaaaccagcgtgaccttgggactttctccagcaatatcctgcagtgtgggaggggagaaacagggcaataggagccagctggggctgggaaaacacgggcagtagaaaaccagtgaagggaagaaatccttggcatttatgagcaaatttcaaaatggctgagcatgagatctaggccaggaggaaatatgagtgaaatgaaaagagtgctgataattggagagaaaagtgtagatgaatgacttagagacaacatgaaatgttcagtggtagagaaaaagcagaatatttccagttctaggtgcttcaggagccacagcttaaggtgcagacatggccaagtccaagaaccacagcacaaacaaccagtcccgaaaaaggcacagaaatggtatcaagaaaccccgatcacgaagatatgaatctcttaaggggatggaccccaagttcccgaggaacatgtgctttgccaagaagcaaaacaagaaggtcctaaagaagatgcaggccaacagtgacaaggccatgagtgcacgtgctgaggttatcaaggccctcgtaaagcccaaggaggttaagctcaagatcccaaagggtgtcagctgcaagctcgatcgacttgcctacattgcccaccccaagcttgggaagcgggctcgtgcccgcattgccaaggggctcaggctgtgctggccaaaggccaaggccaaggatcaaaccaaggcccaggctgcagctccagcttcagttccagctcaggctcccaaaggtgcccaggcccctacaaaggcttcagagtaggtatctctgtctgccaacgtgagtacagaaggattggtgcgataccccccgggctgccatctgcacggggctggggtcctcaaataaacctgaggtaggaaaaataaaaagaaaagaaaaagaataagttgggtcagagggaatttcacagaatgagatttagaagtcaagccactttaaataatgatagaatctaatgtgtgggtttgattatattacctcttaaacccctttcaactctaaaactctatgagaaatatgaatgagtgaatactgcacttacatccaaatttccaagtggctgacagtgtgaccccaatctatccttgttacatatgaagtcccatcaagtccaagtccatggggatagacttggactattttaggaatttctgcatgtgctcaatgataaggataatcaatcactattggacctatatgtctttcaaaaaaaaattttgttttttttgagacaggatctcactctatcacccaggctggagtgcagtggtgacatcatagctcactgcggcctcaaactcctgggctcaaccaattctccggcctcagcctcctaaatagctgggactacagacatgagctacatgcccagctaatttttaaattttttgtagagacgggggttcttactatgttgaccaagctggtcttgaactcctggcctcgggggatcctcctgcctcagcctcccaaagtactaagaatggctgggtgtggtggttcatatccgtaatcccaccaccttgggaggccaaggtggttggatcccttaagcccaggagtttgagaccagcctgagcaacacggactccacctctacaaaaattacaaaaattagctgggcatgatggcacatgtctgtagtcccagctactcaggagtctgagggaggaggattgcttgagcccaggaggttgaggttgcagtgagccatggtggtgccactgcactctagcctgggacagagcgagactctgtctctaaataaataaataaataaaacaaagtgctggaattacaggcatgagccaccatgcccagcaaaacttttaatataaattctactgtcaccagtatttgatagtagactgtggaagttaggtaagatcagagtctgtgtcacataaaagcaaatgtatggctaagaaggaaaaaaaaacctttgcttcacacgtatccatgtaatagaggtttatcctcacttccccctttcccctccctcagtcaatttgcaataataataatttaaaaaaggtaaagtggtgatgtcgtggaacaaattactttgcttgaaagacacaactgcaggttggtgtttacgggaggactcagacttggcatggtattgtgaggcaaagaggacgcttgttaggaacttgtgatcattattgaaccaggcaggggaacctgggcccctgaactctgtctctttatactgcattttgaaagcagcacttggctctctaattgccccatatgctggttttattcggtggctcagctgggtggagtgaactctgggaagagatgcattcatttttagttacctcaccagattgctaattttcactctggaggcataaatcaccataattactgtaatcccaagacgaagggacttgctattctggcacaagggcagcagctatttgtaccgccaaagctgttctacctgagagctggggaaagagttgcatatggctggttctgccaggacactcttagatttggggtggagggtgtgctcggagcccattatcctttacttgggagaaatggagatcctggaggagcagtttcttctgtgttagtggcaagcctgtggcttaagacagagctttggccctcggctcactgcacagcccacactgcccagctgttgacatgtttgacttgcaaacagaacatcaacagaacttcagaacttcagttcctcttctctcatcttttcccatcaactcattccttggtttgtcttggtttttgtttttgcatttctcctgaggaaatccttattaatttctgaagaaattacctcaaatagaaaccagatactacaaaaatccctagtaccctggagcagaggctaaatatcattagggagggggaaaacagaaaaagcccagtgtaacttgtcactttgtcattcatacttataatatggattaaaattgttttcttgttctttattatttttaatagagatggagccttgctttattgtcgaggctggtctccaactcctggccccaagcaatcctcccactttggcctcccaaagtgctgggattgcaggtgtgagccaccatgcctggccattttttttttttttttttttgagacagagtctcattctgtcgcccaggctggagtgcaatggcacgatctcggctcactgcaaactccacctctcaggttccagcgattctcctacctcagcctcccgagtagctgggattccaggcgcccaccatcatgcctggctaattttggtatttttaaagtagagacttggtttcaccatgttggccaggttggtctcgaactcctgacctcaggtgatctgcctgccctggcctcctaaagtgctgggattataggggtgagccaccgtgcccagcccagtgtttttctttttaaataaaatcaacctaaactaagtctaaaaaataccaactagatcctgaatcaaggtcgcttaaaagatgagtaactggcgcagtggctcatggctgtaatcccagcactttgggagtctgaggcgggcagatcacgaggtcaggagatcgagaccatcctggctaacacgggaaaccccgtctctactaaaaatacaaaaagttagctgggcgtggtggcaggcgcctgtagtcccagctactcaggaggctgaggcaggagaatggtgtgaacccgggatgcagagcttgcagtgagccgagattgtgccactgcactctagcctgggcaacagagcaagacaccatctcaaaaaaaaaaaaaaaaaaaaaaaaaaaaaagaaaagaaaaaagaaaaaaagaaaaaagatgaaaaactgataaataaatatgaaaaaattccttgccatttccacagaaggtggagaggccgagatgggggaataccattttcttgacaagttcatatcataatggtgtctgggtgcctggctttgtgtttgtttttgcctgacattttgaagagtcttaaaatgcaagagaaatgggaaacttgactataccaaaaaaaaaatctgcttaggaagaacatttttttttttttttttttgcctaatactataaagccttggagaatttagaatctaaagcatctgttattgctgatggcaggttgatggcctaaaaagagagggaactgtaggtcaggaatgttttgcgcaaaaatgaggctgcgcttgggtattagaaaataaggcaaacaaataacagattgcaacaggataaactgccctgtgaagtagacttgccctccaaccccaatctgcctgccctcagatgacggtaaacagaccagcttttttttttttttttctgtcttccaatcacctgccctcatgtttaggcagcagagatctaagttataaacacagctctgccaggagaccccttggctgagaatggcattcagagtattctagttcttccttgatgtttttccactttcagacctcctatcctttttagaacctgccacagtgcctggtcacaaggttgaagtttaatacaaatttaataagttggtccaaatttggagatgaattctggggaaaagtcaaacagtgaaaaataaggaattttactttctctgggggctcccaggctctctggttgggtcagggcccaagtggagcagggaagaaggggccactctttctgaagtctccctgcatgaatgacagtaacagttgagtggtagtcatatgcttagaagcaaaccattctgattttgcctcctagagcagagatgtctcccctaagatccattttaccccagcagaaaaggccagggttgtctgggttgtggcaacactgttttgacagaaagccctatgatttttctcacaaacttccctaaggatgctgtctttcagctacacgtacttagataatttcttctcccttaccaactcaacctgatgttgctaagaggttcagtactttctctctgctttctacctcatcccaacccccaagttctttcccaaattccagcagctgggaccagtctctgggacagagcagaaataacatggaaatcgggggtagggttaaacacatctataagtctaggaacaggcagaaaagtaacatccctgttactacaagtttggtatcaggaaataatttcttatccatcatgagtggtgatatgggtagtatgagcataagttatatgtagaggtaaattatttactgggctattaaagggccacatggaggctgtccaaggaaagtcatacaataataatggaaatttattattattattttattttttgaaacagagtatcactgtcgcccaggctagagtacattggcgtgatcttggctcactgcaacctccgcctcctgggttcaagcaattctcctgactcagcctcccgaatagctgggactacaagtgtatgccaccacgcccgactaatttttgtagttttagtagagtcggggtttcaccatgttggccgggctggtctcgaactcctgacctcaggcgatctgcctgcttcagcctcccaaagtgctgggattacaggtgtgagccactgcacccgacctaataatgaaaattaattatatctgatattatgttgaaaaatattctatccagaggacagttcggaaacatttacttttgcactgcgttcgattcacggtctcttatggggaggaagagtaggaggattccatgtgcatctgtgtttgggctgtcaagttatctgtatctacataactatttgttttcctttggcttcaaagaaatttttggtgttgcaagaaatatgtatattgcagaaaaactgtcacttcttaaaatgtgcagttaatggcatatctaaataaaatgtaatgttttgctgttaatatttactattgatatatatgttcaataattcccaaacaattctaacatttagtatttattaattctagtatttattgctactactgctgctacatgttatggttccatagcccctattctgacagagctttgaaaacaaaacaaactccctatctgttcctccttccggttaaatattggaggaaagcagaatagtaatattaatttttaaagagaaagaagcacagagaatgaacatcagatagaataagcccttgaaatcgtaactccaagctggcaaattgagcacattggatcaagtgcagagttttccattctattcatggggagaaagaggaagcgaaatggggaggggtaggaagaactcagagggtttagtagtgattccttaggaacctggaaacctggagcttctggagacagtgagaacaatggctgggtttttctctgcctgtcatttttcagtccatgatgagatgttgaagaaacagagtccaaaggtacaccagtgtaaaaatgttgccaaagtgaaaagtgggagactgatttcctccttccgattgattggagagccattcactttagggtgcttctgtttccttactcatcacacagagcactggagtgtgggaaaaatccccatcccacattaaggttgccacaaaggtaaaaaagacctgaagcagaagttgggagacctgagcttatgaccttggacttacagcacagctgatatttgggggaataaggtttgttgttgtttttgtgtgtgtgttttgtttgtttgagacggagtctcactctgtcgcacaggctagagtgcagtggcgagatctcagctcactgcaacatccacctcccaggttcaagcaattctcccgcctcagcctccctagtagctgggactacaggcacataccatcacgcccagctaatttttgtatttttagtacagacgaggtttcaccatgttggccagagtggtcttgaactcctgacctcaagtgatccgcccgtctcggcctcccaaagtgctgggattacaggggtgagccacagtgcccagcccctgggggaataagttctgagaggacacaggaaaactggggattgaaaagcaggttttcacaagagtggaggcagctggctctgtgggttcccagactaaggggatctgtgcttgacagaccagaggccagttctgtgaccatcatctcagccttgaatttttttttttttttttttgagacaaagtctcactctgtcgcccatgctggagtgtagtggtgtgaactcaggtcactccaacctctgcctcctgggttcaagcgattcttgtgcctcagcctcccgagtagctgggactacaggcgcccaccaccaccacgcccggctaagttttctatttttagtagagatggagtttcgccacgttggccaggctggtctggaactcctgacctcaagtgatccaccagcctcggcctcccaaagtgctggcattacaggcgtgagccactgcacccggcctagccttgtgatattaacagtaactgtcatttgcggtgtgcctactctgtgtcacactccttgcagttattccatttagggtagagcaacattattctagtttacagatgagaaaactaaggccccagagattgatttgcccaagcagccagctggcagtggaagtgccagtttcttcgtgtgtaaaacaagagaaggcaatctactgcctactggcttgtcaagggtcacttgagatcggacgacaggaaccacaaagaagtgaggccgggaatttgcggatccacagtaaagcaagtttgtctttttccagacgtgcattaagattcctttttcaagtgttctaaagcgcaggcgcaggctgttttgcggttgcctcccggcgcctcttgtgcaggccggggtcgccctctgccgacccagggcgggagcgcgctgagtgaacgtttccaggcctgagggcgggcggagatttttctcgcctgtagagggcgcagatcggcgtgcagagtaacccactctagttgtcccttccttaagcacttcctgtttgatctctatgatccatcctgttgggacttgattcgttcctcaaattttcaatttaccgtaaacaaaggggacgcgcgctgacccggaagtgaaagctggaacccggccggagtagctctgagcgccggctgtgaggaaggaggttctgggcaagctatagccatggctgtggctgtagccatggcgggagccttaatcgggtcggagccaggccccgcggaagaacttgccaaactcgagtacctgtctttggtgtcaaaggtttgcactgagctggacaatcacttggggatcaacgacaaggaccttggtgagctcggggaggtccctgggacctcagtttgggattgagggaagcggaaggaggaaggaggaaggagaaaggtggttgatggaccgaaagtatgttcgtgtgaatctgtctctctctgtcgcagacaccggtgcccagggtacacgctgccgtggcctcggcttgagagccctcgagaaactttagaaactttcccagagctgtcagtgaagcccggggcggtcatctctgcttgattgttttttgtttgttttttcagcctcaattaaacatgtttaacaacaacagcagcagatgctgcgatgacgacgatgatggctgacgtttattgggtgctcactatgtgctagatgcgatgctcagctctttattgacattattttatttggtcttcacgccactctgtgacatagtagttagcgtctgtgcttttaactgtgttctttgaccgttcatcctgtactcttttttgaggcagggcctcgctctgtttcccgggctggagtgcagtggcacgatctcggctcactgcagcctccacctcctgggctcaagcagtcctcccacctcagcctcccgagtagctgggactacaggcgggcgccaccaagctcgactcatttttaaattttttgtagagacgggggtctcactgtattgcccaggctggtctcgaacttctgggctcaagcagtcctcttccctcggcctcccaaagtgttgggattacaggcgtgagccattgcgtcctgtactatgtcttaaacaccagtcactagatgttttggggcaaactacatctggggagccgaaactgaggaattagaaaaggctagggtcctaaagctaaagccatagacagatggagcctttatgaaggtacagaggatggatgggatcaagggcaaccaatggatggattgacctttggtacgtacagcaaggcttcttcagttgtaacaggagcgaggacagagaatacagttgcagattcagatgagtttagagattggtggtgggaagatgagtgagagagttccagcccactcttcagtttcctaaatgaagataaagtcatcaaccggagggatggaagggaaggggcaggtgacaggaggggttagggaagttagacgagtgacctttggtaagattcatagtttctctgaagctgtttttctcatctgtgaagtgggacgatgtcttcacagggtcaccatatagcatttaggaagatgccctgcagccagtatattttagtttacttttttctcttgcctcccagccaagatgtgtctgtcctatataacttttcccgcaggattcttctcttttagttgataatgaggtgataatttcgtcggttttgctatctcgttaatatgtttcctttattcagcaaatattgagctgggggctaggcataccacagagaacaagacagatttctgctttcagggagcttacctttctctctgttttcattttaactcctaataccttggccttttagaagaaacaaaaaagttattgacattaacccccagtgtttaattgttttgatgttaacttcatttgtgtacaaaaatagagcgaagtataaacttcataatcttttagtttatttatagctaaagatctcaattaatttgcagaaaacccacaaatatgctttttctgttacatacagaattataaaaccagtaacattaaaagtactaacattggctgggtttggtggctcacgcctgtaatcccagcactttggaaggccaagacaggccgatcccctgaggtcaggagtttgagaccagcctggccaacatggcgaaacgccatttctactaaaaaaaaaaaatacaaaaattagctggccatggtgactggtgctatgcaggaggctgaggcaggagaatcgcttgaactcaggagacggaggtttcagtgagctgaaatcacatcactgcactccagcctggacgaaaagagcaagactttatttcaaaaaaaaaaaaaaaaagtactaatattggtttaatgcaatagacagtgtcttttgttgaaactaaattggcagagttgggtttaataacagaaaggcatatatttgcttcttttatgttttgtttgctgacttgattcttttgcttttgaccctgatggatgacttattaatttatgtatttaatttttgggagagttgagatagtagagtttccgatgaaaactggaaaacctgctagacaaattctaaaagaactgtaatactggattatcatttaaattagtgttatttttactgttttcaccaatgaatttttttaaactataaattaattttttataatggattcagttaatttaacaattcccctgtataattgtgaaaattaaaaatactgattaatgggaccaggcgcagtggctcacacatgtaatcccagcactttgggaggccaaggcgggtggatcacgaggtcaggagttcgagaccagcctgaccaacatggtgaaaccctgtcttactaaaaatacaaaaattagcagggcgtggtggtgcacgcctgtaatcctagctactcaggaggctgaggcaggagaatcacttgaacctgggatggggaggttgcagtgagaggatcgtgccactgccctccagccttagtgacagagcaagactccgtctcaaaaaaaaaaaaaaaaaagattactgatggctggcagtgagaatgtgcttcagactgctttgggaggggctcttttgagcatgacatgcctagcaccatgggacttagttctccctccacatttcttgaaagaatgtagcctctgaagttagattgcctgggttttattcctagctccccccagttattattgggtaggtcagtgtctcaaaccgtcagcttcctcattgtaaaacatgacaataatagcacctacttatgagggttgttttggggatcatgaagtaacccataaaaagcacttagcatagtgcctggcacgtagtaatgttcaaaaagtattaaccattgacattatcgttactaacttattatgcataagatgtgttcgtgtagcctgatggcatttggctttcactttatcagaaagataaaggcacattccaggatggaaattgtatggtagtactactttatgagttagtcatctagatctttcatgttatttattcatttacttttctaggattagcattcaaatgaaagcattacagtttttttgtgggtctcatagtatgaggcttattatctcagtctactcccgagtagctaggactacagatgcataccaccacccccggctgatttttgtattttttgtagagatggtgttttgccatgttgcccaggctggtctttaactcctgggctcgagcaatctgcccaccacaacctcccaaagtgctggcattacaggcgtgagccactgtctgaaagtagcttaataaatagctctaatattagaagtttcaagaactaggccgggcacagtggctcatgcctgtaatcccagcacttcgggaggctgaggcagtaggattacctgaggtcaggagttcaagaccagcctggccaatgtggcaaaaccccgtctctactaaaactacaaaaattagccaggcgtggtggagggcacctgtaatcccagctacttaggaggctgagacaagagaattgcttgaacccgagaggcggaggttgcaatgagccaagatcgtaccactgtactccagcctgagagacagagtgagactgttaaaaaaaaatgaaaaaataaaaaaagtccaggtgcggtggctcatgactgtaatcccagaactttgggaggccgaggcaggcaaatcacaaggtcgtgggttcgagaccagcctggccaatatggtgaaatcctgtctgtactaaaaatataaaaattagccggtcatggtggcatgcgcctgtagccccagctacttgggaggctgaggcagaagaatcgcttaaactcagggggcagaggtggcagtgagccaagatcccgccactgcactccagcctgggcgacagagcgagactccgtctcaaaaaaaagaaaaaaaaaagaaaaaaagaaagtttcaagaactaggcaggtgtgccgggcacagtggcttatgcctgtaatcccagcactttgggaagctgaggcgggtggatcacaaggtcaggagatcaagaccatcctggctaacatggtgaaaccctgtctctgctaaaaatacaaaaaattagccaggcgtggtggtgggcgcctgtagtcccagctactcgggaggctgaggcaggagaatggcgtgaacccgggaggtggaggttgcagtgagccgatatcgcaccgctgcactccagcctgggcgacagagccagactctgtcttaaaaaaaaaaaaaagaagaactaggcaggtttgtggagaaaaatttggcaaaaaagtctttcatcaatgtggagattgcaccacccagcagctgcctggccctcatatacagattgggtctgtccttctgttgtgtgcctctgtgtgtctacatgggctcatgctttttattgtcacctttacagtctagtctaggtggcagcgtgcccaggtagtggttttgtgagaagagggtaccatgatgtgggtcaaataggtcttcctagtttaaatgcactcaagggctacattgagccattttgtagtaatatcttcctttcatttgtataaattctctagaatatgtgtggataatttcagcagtctagattttctctcttgttttcttgttttgttttttttgtttttttttgagacggagtctcactctgttgcccaggctggagtgcagtggcgcaatgccggcttactgcaacctctgcctcccgggttcaagtgattctcctgcctcagtctcccaagtagctgggattacaggtgcctgccaccacacccagctaatttttgtatttttaatagagacggggtttcactgtgttagccaggctcatcttgaactcctaacctcaagtgatccgcctgccttggcctcccagagtgttgggattacaggcatgagccaccacacctggccagattttctctctttacccttaccagatggtggtctttgttttttattactgttggataacctaattagttttgttttcaccatacttgaaactgatttcttgttcatgtctcttcttttctgaattctgtttcttatttgcagctgaatttgtgatcagtcttgctgagaaaaataccacctttgatacttttaaggcttctctcgtcaaaaatggtgcagaatttacggtatgtatatgtggagaagataatctgtagatattaatgttttaatttatgtttgtttgtttgtttttttttttgagacagagttttgctctgtcgcctgggctggagtgcagtggcgccacctcagctcactgcaagctccgcctcccgggttcacgccattctcttgcctcagtctcccaagtagctgggactacaggtgcctgccaccatgcccggctaattttttgtatttttagtagagatggggtttcaccgtgttagccaggatggtctcgatctcctgacctcgtgatccacccgcctcggccttccaaagtgctgggattacataatttatgttttaatgtcactattgattttaaattttgatagggtttaatataggattttgatataggaaggagacaattttatacatatcaattaaataagccattaagtgtgtaatgttttcatgccattaagtagtgatgatttaaccagattttctgtgatacctctaggaaaacagggcaggattttcatcattaagtctttgtaggtatttacattcttgttctgtgagtcaggaagttggaaacaagttttgggggtagttctaaaccttgggaaataaaatggttgcagggagcctaataacttttctccccaaagagtcctaaatatcggctttctctgaagctattatactaggttcatgctacaccaggttgacacactatgtttcatgtattccaattagctaaattcaagtgcgtaaccacccttccctacaggacattctttgccttttaagtgtatttaagcactgatatgggagctgacaattttcgttctatgtttcttttcaaaggattctcttattagtaacttgctgcgtctcatacaaaccatgcggcctccagcgaagccttccactagcaaaggtaagcagagcttccagctgagcttagcttctagaatggtgtaggttttgaacatcctgtaaattgcatttgttttcctctcagcagttgctgagcaagtaaatgttccagtaagatttttcaaatgggctgggcctagcggctcactgctggaatcccagcactttgggaggccaaggtgggagtatcacttgagcccaggagttttagaccagcctgggcaacatagagagacctcatctctacaaaaaaataaaaaaattagccaggcatgatggcgtgcctccgtagttccagctacttgggaggctaaggaaggagtgttgcttgagtccaaaagggtgaagctgcagtgagccatagttgcaccaatgtactttagcctgagtgacagaggtttttttccccgtttcaaggggaaaaaaaatttcaaacgacttaagacaaaataaaaaagataagacataacccaatgagtattgctacactcctctttctgctacatttcgagatagtttgtgatcaatgtatttagaaaattaaattacatttatagtaacaggtatgattaatatatagcaaaatgccatgttctgtttcagtttgatacaaatctattgttgaagttattttgttaatcattaataatattaaatatatatctctttttttaaccccttcatgctctttaatgaaacaagatccagttgttaaacctaaaacagaaaaagaaaagctgaaggaactcttcccagtcctttgccaaccggacaacccttctgttcgggtactgataccattttaagagtgtctactataaatatatattctcaaccccttttctttgtctcatagtaattttattaattttaagtttgcctttgttgtaacttatttttaagaatgaaagtgtttgatcactccctgagcatgtactatgtattgaatttgttaaggggttctgagaatgatattcaagggaaatgagattgggaatttggggaagtagtgattaggaatatgaaataaggttctggaacagatgcctaaggtgtgaaattagattttttttttttgctctgttacttgttaaaggtctaatttttaaagcattttgatttttaaatttcattttaataaatatttattgagtacttactgtatgccaaacactgttctaagtacctggataacagcagtgaacagaacagacaagagtttcagcctttggagattatatcctaattttggggtagggagcaggaaataaacatgtaaacattctggtggggaggagataggcaataaacaaacaaataggtatgtaacatagcagatagcaataagggctatttaaaaaaataaagctggagtgggggtagggaggaagagtgcagagggagagttgctttttaaaatttttaacacctgttttctattaatataatcatcacttgcattctttcatggcagggatgattaatatctaactgcctttcatagaattctattaaggacagaggggatttgtcaaatgtagcagtaattctcaagagccttttttccatttcttctgcatctatcctgaatcaagtttgaaatctctgcccctcttctatttccctcacatagtgattagtgatttatagatgtacctgaggtacatacagattcttgagtagttttttttcctaactttgccggcctctacctctgcagaccatgttggatgaagatgatgtgaaagttgctgtggatgtcctgaaagaactggaagctttaatgcccagcgcagcaggccaggagaagcaaagagatgctgaacaccggtttgtccttagtgtcctgtcctttggaagtttagggtactgtgacagttgaatattatggaccagccaagcaaaattttgggcaagtttacagaatctggactggtcatatatcatattgttggatctgttttcattgcttcctgctaagtgtatgtagcaaatgctaggttgttcagaatatagaagtcagggttgaaagaggctgaatatgtttgtggctcaattctttattggcttatagggatgtcgtagttattgaaactctaattcagttcaaaacctagtgggtacctaccatgtgcatggcactgtactgggtgcttggggatgcgaagatgaaatcggattggtttcttttttaaacaggtgcttattgatttgttagggacaggacaaagaagaagaagcggagtcgaagccgagatcgaaaccgagatcgagacagagatagggaacgaaaccgagatagagaccacaagcggagacaccgatcccgctctcgatcacgttccaggacccgggagaggaataaagtgaagtctagatatcggtccaggagcaggagtcagagtccccccaaagaccggaaggaccgggacaaatatggagagcggaatctggatagatggcgggataagcatgtggaccgccctcctccagaagagcccaccattggtgacatttataatggcaaagttaccagcatcatgcagtttggttgctttgtgcagctggaaggactaaggtaatgactggtgctcttttgttcacaccagtgatgggcagaatttcttttatcactgaggatgttcacattctaaaaagttactttgattaatgacactttagtcaaatcagccatacatggttcttagaaattgactcttttgaaatgttacagagccatttattcctttctctgtcttcaggagatctgtcctttgcttgttgggacagatagaatttgcttccccaccccatgtctccccatgaggagagtgttaatactattttattgtttgaccaccttcatggtacttttctcttgagtttaagaccattttcttttgttagttccagtaagggtagaaattggttgggggaaaaatattttttggcatgttccagatgtgtctggctctccctcaggaagcggtgggaaggcctggtgcacatctctgagctccggcgggagggtcgtgtggccaatgtagctgatgtcgtgagcaaaggccagagggtcaaagtcaaagtgctgtccttcactgggaccaagaccagcctgagcatgaaggtaggtgagatggtcagcctgttcttacatgtgatggccaagggaatggaagaggacagcaagtgagacagctcccttgtttttgtgccttaggatgtggatcaagagactggagaagatctaaacccaaatagacggcgaaatcttgtcggggagaccaatgaggagacctcaatgcggaatcctgatagacccactcacttgtcccttgtcagtgctcctgaagtagaggacgactcactggaacgcaagcgcctcacccgaatctctgacccagagaagtgggagatcaaacaggttggggcctttagttttcatgaccagatagtcattcagcatgtagcatggtgcttaggggtgtgccctggagcacgatggcctgggataacttttggccactgtattagtctgttttcacactcctgataaagacgtacctgagactgggcaatttactaaagaaagaggtttattggacttagaattccacttggttggggaggcctcacaattatggaggaaggtgaaaggcatatctcacatggcagtagacaagagagcttgtgcagggaaatgccctttttaaaaccatcagatctcatgagacttactcactatcgtgacaacagcgtgggaaagagctgcctccatgattcagttaccgtccactgggtccctcccacacacgtggaaattcaagatgagatttgggtggggacacagccaaaccatatcagccacttattagccgtgtaatccttagctaagctactctacctcatgcctcagtacccttttctataaaacaggaccagtgttggtggtgtgaggattaattaaaggtgaaagtcgttgggcgtgatggctcacacgtgtaatcccagcactttgggaagctgaggcgggcgggtcacgagctcaggagttcgagaccagcctgaccggtatggtgaaaccccatctccactaaaaatacaaaaaattagccgggcgtcatggtgcgcgcctataatcccagctactcacgacgctgaggcaggagaatcgcttgaacccgggaggcggaggttacagtgagctgagatcatgccactgcactccagcctgggcaacagaacaagactctgtctcaaaaaaaaaaaaaaaaaagtgaaactcttaggttagtgtttagcatatggtaattgctatgtaagtcttcattcttttgttttctttccttttttttttttttttaattgagacggagtctcgctctgtcacccaggctggagtacagtggtgcgatctcagctcactgcaacctctgcctcccgggttcaagcgattgtcgtgcctcagcctcccgagtagctgggattacaggcgcccaccaccacgcccggctaatttttttgaatttttagtagagacggggtttcaccatgttggccaggctagtcttgaactcctggcctcaggtgattctcccacctcggcctcccaaagtgctgggattacaggcgtgagccactgtgcccagcctattgttttcatccttcttcactaaataacataaccgtggtgtgtcaagcaccatgcagggctagggctataaacgcgaatatatcatggttgctatgcttaaggaactcaaagtccagcagaggagacagatctaaacaaataattgtgaggggttacatattttttcctttatttttgaggcaagttcttacttgcactattgcccaggcaagagtgcagtggcatgaccatggctcactgcagcctcaacctttcaggctcaagccatcctctcatctcagcttcccaattagctgtgacctcaggcacatgccaccatgcctggctaattttttaattttttgtagagacagtcttgccgtgttaccagtgctcatctcaaactcctgggctccaagtgattctcttgtctcagcctcccaaagtgttgagattacaggcatgagctgccgtgtctggcctacgtattatataataaatgtaccagagtgctgtggaaacaagggaaagagcagataacttttcctggggataatacttttgagcttatactttacagcaccatgttggagaaccacctctgcaaccctggaatgggatatatgacatttgagctcccgatatcgtgggtcagaggagaaaaaaactgggtttcctacatgaaacctctgtaattaactctcctagaaaagaagagttttggctgggcatgtcgctgacacatgtaatctcagcactttgggaggccaaggcaggaggattgcttgaggccaggagtttgagaccagcctggacaagtagtgagaccctgtttctagaaaaaatttaaaaattagccaggtattatggtgtgcgccactagtgtcagctattcaggaggctgaggtaggaggattggttgagcccaggagtttgaggttgcagtgagctttgatcaggtcactgcacttcagcctgggtgacagagcaagatcctgtctcaaaaaaacaaaacaaaaccaaaaaacaaaaaaaaagttttgatcttagcaggttacaaatgctgccttctcttctttggctagatgattgctgccaatgtcctttccaaagaagaatttccagactttgatgaagagactggcattctccctaaggtggatgatgaagaaggtaactagtcagttggatcgagaagggtaattggcaagttgagccattgaattgggtgatttgcctgtagtttaacccagtggctattaatcatttgttctttggatctcactactcatctctcaaaaaaaaaaggatctcaccatgatggaagcaagaagttcatttttctgacaagtgcttatgtattattattattatacctgttgcttataataagctctcagggccaggcatggtggctcacgcctgtaatcccagcactttgggaggccgaggccagcagatcacctgaggttaggagtttgaaaccagcctggccaacatggtgaaaccgtgtctctactaaaaaaatacaaagattagctgggtgtggtggcgcatgcctatcgtcccagctactcgggagtctgaggcaggagaattgcttgaacccaggagacggaggttgccgtgagccgagatcgcgccactgtactccagcctgagtgacagagtgagactctatcaaaaaaaaaaagctttcaggatataaaaagttataattgtatttttgggagtaaatttgatctcatattcttagtaattattctgaaaaccctggatccacctagattacctctgagttgccctggaaacaacttttaactcagcccataatgacttttttgaaattatgaaatcttatgatagaattctctaacttatattgtagtagtaagtgagcacctacgtactcaccacccagcttaagaagtagaattttacaagcacctctgaagcccctacatgctcccctctgcttagatcttctttcttccttctaggagtaaccaccgtcccacatttgtgttaattactccctggcttttctttagttttaccatctacgtatctatccctaaacattatattgtgttgtctatttttgaacttaactcatttttctttttttttgacttacatatttttgatatttatgttgatatttatattggtatttcactcacttttattgctatagagtgtttatatataaattgtctataatttatccattttacttttgatggacatatgagttgtttcttggtttttggttaatctttgtgaataatagtattttgaaattgctatattgtctcttagtgcttatgtgcaaaatgttcttttttccctaaatgcatagaattactgggtaggccaagtgtcatggctcagccctgtaatcccagcactttgggaggctggctgagatggtaggattgcatgagcctaggagtttgagaccagccctggcaacatagctaggccctgtctttacaaaagaaaaaaaattagccaggtgtagtgatgtgtgcctgtactcccagccactggggaggctgaagtgggagaattgcttgagcctgggaggtcgagggtgcagtgagccatggtcatgccactgtgctgtagcctgggcaacagagcaacaccctgtcttaaaaaaaaaaaattactgggtagtaagaaatgtgtgtgtttgactttgctgggcagttccaaattgttttctgttggtttctgtaccgtttatacttctgccataagtgtaagcaagttccgcttggtgttgttcaattgtcgaactaattttttacaaatttattttgggttaagaattattccacaatgaagttggatggcaaatgccctagtaccatttagaatgtcaggagagcattttctcacaggcttaacttcttttcaaagtaggtctgatcagttcttgggctggagcacaaatgctctagaaatggctggtgatgggggaatagtcacctgggttagagttttacttgcattgctgtcctttgacctgggaaggtgttttttttttttttttaatttgagacggggtttcgttcttgttgcccaggctggagtgcagtggcacggtcttggctcactgaaacctctgcctcccgggttcaagcgatcctcctgcctcagcctcccaagtagctgggattacaggtctgtaccaccaagcccagctaatttttttgtatttttagtaaagatggggtttcaccatgttgaccaggctggtctggaactcttgacctcaggtgatcagcccgccttagcctcccaaagtgctgggattacaggtaagagccactgcacccggccttttttttcttttttttttttaagacagagtctcactctgtcacccaggctggagtgcaatggcttgatctcagctcactgcaacctctgcctcctgggtgcaagctattctcctgtctcagcctcttgagtagctgggactacaggtgcccaccaccaagcctggataatttttggatttttaatgagatggggtttcactgtgttgaccagtctgatctcaaactcttgacctcaagtgatcctcctgcctcagcctgccaaagtgctgagattacaggcgtgagccaccatgccccaccaggggaagctgtttttgataaagattgttggtacctatggaaattaattgtcttggtgaaaattgttattttttcttgtttatggctaattcttcttttggggggacttttagatgaggaccttgagattgaattggttgaggaagagcctccattcctgagagggcacactaagcaaagcatggacatgagccccattaaaattgtcaaggtgagaattactggacctttaacctggaaatgtcaagtggacttctttttctaaagtaatgggtcaggttattagatctgcgtaagtagaacttgggccacagaaagtattactggctgttagccagggtctataatagttttattttaaatggaggttgggttggctttattgcttttgcctgttgaattcttttgtgctccttttgtgtattttgggtggaagcagagatagataggaatgcttaatctgccatcattgcctttgcctggattccttagggcttgaatcttgcagattcaaaggcaattttgaaggatttacttgagcacttggggctggccaccatagaaagctgtagcactgggtgctggagagggcagagctgtaaggggaatccaaaccagaattcatagaacaataaacattttaggtatggaaaagggtatatttaaaggtctcccagcccagcacatatgaaatgcttataatccacgcatatcattcttctgcggtgttcttctcatatggtcatctcatagctgcatgacattgttagtgacagggaattcaccagcccttaaggaggtacatttcatcatgagatggatctgatcgctagttcttctttaggcatacctgaaacctcgctcactgaagtgtccacattggtcttgattttggttcccagggtcatacagaaaaattcttatacctttcttatgtccttcatacgtttaaaggtagcacatcattcctatctcttttggggttctcatattcaaactaaacatccagttccttcaatgatgtaacattgtccttgttcattttatctgaatatgctacggtttatccatttctttcatatagtctgttacattgataagaactttattccagatgtagtctcatgttttagattacaggagcttaacttctacatattatttcccggacatttaatccatgttgttttttcttctgttgcaccagaacccagacggctccctctcccaagcagcaatgatgcagagtgccttggccaaagaaaggcgggaactcaaacaggcccagcgggaagctgagatggattctattcccatgggactcaacaaacactgggttgaccctctgcctgatggtaggacccttggaggggtgtatggaccttgtttaaaaatctgagcctttcagaacacagggaggggtcactcccggcacacactaaaaatttacccttgggccggggcggtggctcatgcctgtaatcccagcactttgggaggccaaggcaggtggatcacctgaggtcaggagttcgagaccgacctggccaacatggtgaaaccaagtctctactaaaaaaatacaaaagttagccaggcatggtggcacacacctgtaatcccagctactcgggaggctgaggcaggagaatcgcttaaacccaggaggtggaagttgcagtgagctgagatcaggcaagtgtactccagcctgggtgatagaatgacactccatctcgaaaaaaaaatttacccttggtttttcacttcagttagagcatgtttggttttttcttaaacacatgtttaaaaccaaaaatgttttaatagccatggtcaaatcattagactgagtttttcttctgaatcactttaaaaatgttattctagcgcggtgtctcatgctgtaatcccagcactttgggaggctgaggcgggcggatcacaaggtcaggagatcgagaccatcctggccaacatggtgaaaccccgtctttactaaaaatacaaaaaatagccaggtgtggtggtgcgcgcctgtagtcccagctactcgagagactgaggcaggggaatcgcttgaaccctggaggcggaggttgcagtgagccaagatcgcgccactgcactccagcctggctacagagtgagactccgtctcaaaaaaaaaatttttattctaaaggtaatacagctttgaagcttcctttttcatataattctttgtgcagtaaatattagctactagatatagtcataacaaatacttattaatttaatttgtgtttggcaactggggatacgatttgaattaaacagatatgatccctgcttttatgcgctacaacttagtcggggatatggatattaattaaataatcaccaaataattaaattatgatcagtgccatgtgaagaagtacaggcagtgtaattgactgtggtgggtcacttccctggggaaatcgagacccaaaggataaattggactcagtctgtcaagtggagatgggatggaggttggggagtatgttccagcctgaggagtagcccgtgttgggtttgtggggtgggaaagaaggaactgaaagaaggcttgtgtggatggaatagagagagcagtgggcagtggtaggggatgagataagaacatcaggccagggctttgtaggtggcattaggaagctgggctcaattctaatagcactgggagatgttgaaaagttcttttgttgttgttgtttttgtttctgagacagagttttgctcttgttgcctaggctggagtgcaacaccatgatcttgactcactgcaacctccacctccctggttcaagtgattctcctgcctcagactcccaggtagctgggattacaggcatgcaccaccacgcctagctaattttttgtatttttagtagagacgaggttcctccatgttggtcaggctggtctcgaactcgcgacctcaggtgatcccccccccatctcagcctcccaaagtgccgggattacaagtgtgagccaccgtgcccagccagatgttgaaagtttgcagctggcacatggcatgaccagagttgcatttccaaaggatgattgagggtgccctgcagaatgagttggatggggcacatgtgatgatttagaaagcttttatgaagagagagaatggtggcttgaacatggaggtagcaaagaggagggatgtacttgagaaaagtaatttgttgaatgtggggcaacaggaatggtcaaagatgacttccaggtttctggtatgagcactaggatgaatgatgggaacactggaggagaaatgggtttgtggggaaagatggtcaaattccgttttggacttgtgtccgaggcaactagaggacatcttaggttgaggtatccagtgtagaattgagtataagagctcagaagagaggtctgggctggagacagaagtttgggaattgtgttaatttagatatcagtttggctgcatgtaatagagattcaaatattagattaggttcggcatgatggctcacgcctgtaatcccaacactttgggaggccgaggcaggagaattgcttgaggccaggagttcaagaccagtctgggcaacatagtaagaccttatctgtattttattttattttgttttgttttgttattttagtttagtttagtttagtttttgagatggagtctcactatgttgccccagctggagtgcagtggtgcagtcttggctcactgcaacctctgcctcctgggttcaagcgattctcctgcctcagcctcaagtagctgggactacaggtgaccgccaccacgcacgagtaattattttgcatttttggtagagacagcgtttcaccatgttggtcaggctggtctcgaacttctgacctcaaatgatcttgcccaccttggcctcccaaagtgctgggattactggtgagccaccgtgcctagcccttgtctctattttaaaattaaatttttaaaaacgacaaaaataaaaaccaaaatattagatttacagtagaaggttggacatattcgttcattgtttaacaatatcatcttccatttcctcagaataaacccattcattcccttttaccctttagtgaaatgttctccatgaccctcctttggcctctgcctaagctcacttatttggttagtaggcataagtattttttcgtagccagcttttggcatcaaatttgtaaaatgtttgcatatgctagagagccactaaaattctgctcatttttttttgctcctcaagccacaattccaaggtgaatcttgaaaatataagctaggtctgggcaaggtggctcacacctgtaatcccagcactttgggaggctgaggcagacagatcacttgagttggggaatttgaaaccaagctgggcaatgtggtgaaaccctgtctctaaaaaaatacaaaaattagtccaggcatggtggctcatgcctgtaatcccagcagtttgggaggctgaggcgggtggatcacctgaggtcaggagtttgagaccagcctagccaacatagtgaaaccccatctgtgctaaaaacagaaaaattaacagatgtggtggcacgcacctgtaatcccagctgctagggaggctgaggcaagagaatcacttgaacctgggaggcggaggttgcagtgagccgagatcacgccattgcactccagcctggacaacaattgcgaaactccatctaaaaaaaaaaaaaaaaagtttagccgtgtgtaatcacgtgcacctgtattcccagctactcaggaggctaacgtgggaggattgcttgagcccaggaggtggaggttgctgagctgagatctcgccactgcactccagcctgctgggcgtctgagccagaccctgtctcagaaaaagaaaaaaattaatctgagagaaaccaggcacaacagaccacatattgtatgaagtatccagaatagaacccgtagacatagaaagtagactaatggttgccaagggaaaggaaaagggaggaatggggagtaactgctaatgggtacagggtttctttctgatatgatgaaaatactctaaatagtggggatagttgcacaacttaatgaatatacagtaaaacactgagttaaacacttaaaaagagtaacacggagacctggcttggtggctcatacctgtaatcccagcactttgggaggccaaggagagaggattccttgaacccaggaatttgaggctgcagtgagccgtgattgcgtcactgcactccagcctgggaaacagagcaagaccctgtctcaaaaaaataaaataaaataaaaaaagtgtaacatggtttgtgaattacatctcgatatagcagttatttaaaaaggggagagtgctgcgcatggtggccatacctgtaattccattactttgggagggtgagatgggtggattgctttagcccaggagttcgagaccagcctggcaacatagagtgacctcttctcgcttgagcccagaaggtcggggctgcagtgagtcaggattgcaccactgcactcccacttggatgacagagcaagaccctacctaaaaaaaaataattccagtgtcaagcagtcaggtcttcacttctctcaactaaccttttttctgacatcacaggtgtgtagcaccacttgttacagtctctttcccattccctgctgccccttctatattcttttcttcacattaatttgtttctttgagtacttttgatcacgggtcgctgaattgagatgctgcatgtgcagtgcccgcatgccattttatttttttcctggtacatcttgaggtagcttgaggacaatactaagttgcctgttttcctttccagcggaaggcagacagattgctgccaacatgaggggtattgggatgatgcccaatgatattcctgagtggaagaagcatgcctttgggggcaacaaagcctcttacggaaaaaagacccagatgtcaatccttgagcagagggagagcctgcccatctacaaactgaaggagcaattggtccaggtgagaagacttttatgatgtattggtggggagtagggttattgtctaaaagaggggtgatatttttaaactgaaactaacgggacaagtatgtgcctacttgaagtggctcatccaaaagagttaagaaagaaggataaaactttctaaatactttttttttaaatggggctgggcgcggtagtggatgcctataatcccagcacatcagaggccaaggcaggaggatcacttgagcctaggagtttgaaaccagcctgaggcaacatagggaatcttgtctctacaaaaaataaaaaatttggtggggcgtggtggcccacacctgtaatccggcactttgggaggcaaaggtgggcggatcacaagttcaggagttcgagaccatcctggccaacacggtgaaaccttgtctctactaaaaatacaaaaaattagctgggcgtggtggcgcatgcctataatcccagctactctggagtctgaggcaggagaatcgcttgaatcagggagtcggaggttgcagtgagtcaagatcacgccgctgcactccagcctggctacagagagagactctgtctaaaaaaaaaaaaattacctgggtgtggtggtccatgcctgtaatcccagctactcgggaggctgagataagaggattgcttgagcctgagaggtcgcggctacagtgaactgcaatcacaccactgcactccagcctgggcgaccaagtgagaccccatatcacaaatgtttgtgtgtgcgtgtacagacacacatacttatgtatgtgtctgtatatcttctttttcctggggcccctagaacagtttccaagtgggcagagtattgtgttgcatggaccaacagctctgttcagtaattaaaaatgaggatactcagtcaataaactcatatgggcaactcatagagtgcttcggtactctatattctggagttctgattttaagaccaccgagtcttccttgaggtaatcaggtttactagtttctagtgaatcctttcaacaatatcttatatgtatacaagcaagtacaaatatatgcacacacacgcacacacattttatatgagtactgtgtgtgtttacaggtggcagtgatattatatacactgttctacatctttttccacttaatgatatatctcagagatttgtgtgtgtgtgtgtgtatgtgtgtgtgacagagtctcgctttgtgcaggctggagtacagtggcttgatctcagctcactgcaacctctacctcctgggctcaagtgatcttcccacctcagactcccaagtagatgggactacaaggcatacaccatcatgctcagctagttttttgtattttttgtagagatgcggtctcactatattgtccaggctggtcttgaactcctggactcaagcaatcctccctccttggcctcccaaagtgctaggattacaggcatgagccactgtgcctggccttcttaaacaaacaaacaaaaaaaattgccaggccaggcacagtggctcacacctgtaatcccaatactttgggaggccaaggcgggcggatcacctgaggtcaggagttcgagaccagcctggccaacatggtgaaaccctgtctctactaaaagtacaaaaattagccgggcgtgctggcgggcacttgcagtcccagctacttgggaggctgaggcaggagaatcacttgaatccggaaggtggaggttgcaatgagctgagatcatgccactgcactccagcatgggcgacagagtgagacttcatctcaaaaaaaaaaaaaaagcctttttttatgggctgtattatttggataggctctggtttatttaactagtcctatatccatagaaacatcgttgattgtaatccttggctgttacaaacaacgtagaaataagaaataacttttggggaaagatatagaaatttgggagttacagtgggaaggaacattttttatgtatcttttaaattcattgttgacttctttaactatatgtgtatattcctcttttctttggtgttagaatatagtaattattttattccagagtaatgtagattttaatgaccatatttatattctgtttaatgaccatatttatattctggcagattttaatgaccatatttatattctgttgctttcaggccgtccatgacaatcagatcctgattgtcattggtgagacaggatctggaaagacaacacagatcacccagtacctggcggaggcaggctacacttccaggggcaagattgggtgtacccagcccagaagagtggcagctatgtcggtggccaaaagagtgtcagaggagtttggttgttgcttaggccaagaggtaagtagatagtggagtcgctcgaaaaataccagaagcaaaggcccaggtctcttaatctatcaaatggaaatattaataatactgccttttttcaggtttctcctgagggagagagggttcccattgtcataatcagtctgttcagagtatagtctaagacataccttactatgaggaaattactgtacatcttgatcagattcttaagattatgagtgagagtgactgggctgaaatcttgcctggtgattgggaaaaggagacatttgtatcctaggttttccccttctcttctgctttaggtgggctacaccattcgatttgaggactgcactagccctgaaacagtcatcaagtacatgacagatgggatgttgcttagagagtgcttgattgaccctgacctcactcagtacgcgatcatcatgttggacgaggcacatgagaggacaattcacactgatgtgctctttggattgttgaaaaaggtaactagatgctctttaatgacccctctacctgttggaagctgaattctggcagttggatttgagtacctgtgtctttgggtagtccttttcagtaagccacataatatttctcttcagacagttcagaaacggcaggacatgaagctgattgtcacctcagccaccttggatgcagtgaagttttctcaatacttctatgaagctcccattttcaccatcccaggtcgaacatatccagtggaaatactgtacacaaaggaacctgagacagattatctggatgccagcctgattactgttatgcagattcatttaacagaaccaccaggtaaggggaaaaagcaattttcctttttgggaggcctaattttccctcttaggccaaaagtcctcatatgggtatcttttttgctaatctttttaaaaacaacttctaaatattcatctctctgcaagcctcaggcttgtatgtttgaaatgatggtggttataatgtcatatataaacaaacttgtattgtttacttactggtcagaatatgaatgcatatgttctgttatttgaagttttattaatatcaccatagcccttgtataggacacacatacacacacagaaagtagatgaatgttctattctgctcgtaggtgatatcctggtcttcctgactggtcaggaagaaattgatactgcttgtgagatcctgtatgaaagaatgaaatccctgggacctgatgttccagagttaattatcctcccagtgtactctgctcttcccagtgagatgcagacccgaatctttgacccagctccaccaggcagcagaaaggtaacatgggcaaaaatgaagcttccatgtgccctgaaaccatgtgttgtgtgcagcctgtcagccatagtagggattgcttagggtgtatgcaagtctttttttttttttttttcctcgaggcagagtctcgctctcacccaggcaggagtgcaatggcaccatctcagctcactgcaagctccgcctcccgggttcacgccattctcctgcctcagcctcctgagtagctgggactacaggcacctgccaccacgcctggctaattttttgtatttttagtagagacggggtttcaccgtgttagccagtatggtctcgatctcctgacctcgtgatccgcccgcctcagcctcccaaagtgctgggattataggtgtgagccaccgcgcccggccaggtgtatgcaagtcttgtttgttaggtttcagagactggtccaaccaatttgtttaggaatgaggtccaaccaatttgtttagtatgtgacctctcctcttcttcctcttcttcatttgacaaatattttttgagcatctaccaggctttgggctacacatgggagctgcattgtgagaacaagcctctatctgctgtggggcatcccccagtcaacagactttcagcatttagtgtgaaaatgccactcatgcttggatacccaggcgggagcacccaaccctgtcttcctagaggaaataaggatctaaggtagtcctggagaactcttgaaaggcaaggggacaagcattctaaggacacagaactatctgtgatggcctggagacgagcaagtagggccagttcagggaatggcatagttccagtggctggaaccaagtatatgactgtgtgtatgagacaacaggaaaggagacagatggatgtaggtatttttttagtaacagttttattgagatataatttacatacctttcaattaactccctccacctcccacttatttttttttttttttttgagatggggtctcagtctgtcacccaaggtggagtgcagtgatgtgatctcagctcactgcaacctctgcctttcaggctcaagtgatcctcctgcctcagccgcctaagcagctgggactacaggtgcatgccaccattcttggctaattttggtttttgtttttgtttttgtgtttttttttgagacagagtttcactcttgttgcccaggctggagtgcaacggcacaatctcggctcactgcaaccttcacctcccaggttcaagcgattcccccgcctcagcctcccgagtagctgggactataagcacccactaccacgcctggcttatttttgtatttttagtagagatggggtttccccacgttggccgggctggtctcgaactcctgacctcatgtgatctgccggtctcggcctcccaaagtgctgggattaccggcgtgagccactgcgcccagccaatttttgtattttttttgtagaaacacagtttcgccatgttgcccagattggaatttactgttttttgtttgtttgtttgtttgtttgtttgttttgagatggagtttcgctcttgttgccgaggctggagtgcaatggtgcgatcttggctcaccgcaacctccgcctcccagattcaagtgattctcctgcctcagcctcccgagtagctgtgattacaggcatgtgccaccacacccggctaattttgtatttttagtagagacagggtttctccattctggtcaggctggtctcgaactcctgacctcagatgatctgcccccctcggcctcccaaagcgccgggattccaggtgtgagccaccgtgcccagccagaatttacccttttaaagtgtacagttcaaaggcttttacccatggtatgtggggattggttccaggacccccgaggataccaaaatccaagtatgctcaagtctcttatgtaaaatgccatagtatttgcatgtaaactatgcacatcttcctgtgtgatactttatctctagattacctataatacctcatacagtgtaaatgctatataagcagttgttttactgtattttttatttgtatttttttattgttgaatttttttcctcaaatatttttaatctgctgttggttgaatccatagatggggaaccagcagatacagagggctaaccatattcacagaattgtgcagccatcaccacaattatatttagaacaattttatctccctaaaaagaaatgctgtaccctttagcagtcatctacccccatttactcctctgctcagcctctggaaaccactaacctatatcttccatctctgtggatttgcctattctagacatttcatataaatgaaatcacatatttgtggctggcttatttccagtgatttttccagacttagcatgttttcagagttcatcaacattgtagtatgtatcaatacttcatttctttttcttgctgaatactgttgtgttgtatgggcacaacacattttgtttatccatttatcagttgatggacattggagctgagcgcagtggctcacacctgtaatttcatcactttgggaggctgaggcagatggatcacctgaggtcaggagttcaagaccagcctggctgatatggtgaaaccctgtctctactaaaaatacaaaaattagccaggcgtggtggcgggtgcctgtaatcccagctacctgggaggctgggacaggagaatcacctgaacccaagaggcagaggtttcagtgagccgagatcgtgccattgcactccagcctgggcaatgagcaaaactatctcaaaaggaagataaagatagacataggagtcattttcacttttgggctttcttgaataatgctgctgtgaacatttgtttacacatttttgtgtgagccaggcgcagtggcttatgcctgtgatcccagcatttttttttttttttttttgagacagagtctttctctgtcatccaggctggaatgcagtggcatgatcttggttcattgcaacctctgcctcccaggttcaagtgattcttctgcctcagcctcctgagtagctgggattacaggcatgtgccaccatgcctggctaatttttgtatttttagtagagacagggttttgacatgttggcctggctggtctcgaactcctgatctcagatgatccatccgcctcagcctcccaaagtgctaggattacaggcatgagccaccacgcctggcagatcccagcatttttggagaccaaggtgggaggatcccttgagcccagaagttcaagatcagcctgggcaacatggtgagacccctatctctacaaaaaaaaaaaaaaaaaaaaatcagccaggcgtggtggcacatgcatagtcccagctactcaagagattgaggtgggaggatcacttgagcctgggagggtgaggctgctatgagccatgatcacaccactatactccagccaaggctacagagcaaaccagaccctgtctcaaaaaagaaaaccaagtttttgtgtggacgtatgttttcatttctcttggacatatacctaagagtagaaggcagatggacttggccgggtgtggtggctcacacctgtaatcccagcactttgggaggctgaagcggatggatcatgaggtcaggagttcgagaccagcctggccaacataatgaaacccagtctgtactaaaaatacaaaaattagccaggcatggtgacacgtgcctgtaatctcagctactcgggaggctgaggcaggagaatcgcttgaacccgggaggtggaggttgcagtaagccgagattgcaccactgcactccagcttgggcaacagagtgagactctatctcaaaaaaaaaaaaaaaaggcagatggacttgagtaatgttaaagagttaaaatggacaagacttggtgggtactagcaggtaaagggaagaagggtgagggaagtcaggcatgactgtcaggtttctggcttgggcagctggatggaagatggcactgaggagggaaacatgggaggaggcttgagtggaaagatggtgaatttctcccctattctattcctaataatgagagttctttctaagcagggcttctgtagttctgtagcaggtagaagcctttcaggaccagtaagatgctggcatgatgcgtgatattccggtgcccccagtgatgatttttccaagcaattgtgttttattagctgaacctttgggtggaagaacagtgacagtgccaagctgagactaataatcctccagatcacatagactgctacacacacgcaaactgtgaaattcctgtgtcatctcatggttcattttatgatcagtaaaaagaagcaatctccctcttgttccacatacatattccgcaaaatacaagcagctcattttttagtccagatgtctcggtaggggaaagaaaaatctcattttgcattggcacatgtgatgccaggaaatctctgctttcccagggtgctagaaaattaaaattgtagtaatcaacattggatctagaaaatgagatacacagtagctatttgcaccaaatgaaattggcttttattggctgtagctttttcctattccactcacctctcaggtaccatcccttttccaacttaaccattaagcagaaggtacctcccttctgctgttggaggctgagctgggattaagtgtcattttaaccgtctagagagagagatagccacatattcctttgggaagatatctgggttcagaagaccttttcacacctcagggctgagcctgggcacctcactccagctttgcccctcttgcctgcaggttgtgattgccaccaatatcgcagagacatcgctgactattgatggtatctactatgtggtggacccaggattcgtgaaacagaaagtttacaattccaagacagggattgaccagctcgtggtgacgcctatttctcaggtatgacggcttgtatcaacagttttcctgataatcctgattagggcctttctgaaacttttttatggttatatatttcaaacttgttttcaaagatgaacttttatgatactgggtactataatgacatgagggaaggattttttgttatttgtttttaatctttttttatccctgaagtctgattgatccttgaagtttttaatctttttttttttttttttttttgagactaagtttcactcttgttgcccaggctggagtgcagtggcgcaatctcggctcactgcaacctctgcctcctgggttcaagcgattctcctgccttagcctcccaagtagctgggattacaggcatgtgccaccacacctagctaattttctatttttagtagagacggggtttcatcatgttggtcaggctggtcttgaactcgcaacctcagatgatccacccgtcttggcctcccaaagtgctgggattacaggtgtgagccaccacgcccggccctttttaatctttagaatagtatttcactattaaaatgcccccgtaaggccagacaccttggctcacacctgtaatcccagcactttggaatgctgaagtgggaggattgcttgaggccaagagttctaaactagcctgggcaacatagcaagactctgtcactataaaaaatttaaaaaaaattagcctggtatgggggcatgtgccaccagtcccagctgcttaagagtctgaggtgggaggatcacttgagcccaggagtctgaggctgcagtgagctaagatagcatcactgcactctagctggggcaacagagcagactgtgtctctaaaataataatttgtttaaatgccccataaaactagaacataaaaaaagtttgaatcctagtaccctatattacctattttagatggaaagatcagtactttattttctagtaccttgcttagctacgagatagatatctgagataataataaattatatgattttctggttttttggtaattatggaataatttcctgcctaaatgacatttaaaaatgaattacccgatcacttttttgagagaagtttggcaacagtatatccaaaacttaaatgttcatctctttaacctaactgttctgcttatagaaatttatctgaaagttagaaatgattaaatacatgtccaaaggtaatagaaaaggatgttcatcgaaggattggtttatatcagaggaaacctggaaaaaattctaaatgtattccaaaagggaagtagtttaataaattatggtatattcatgccatagaatgttggtggcattaacatggtggtgtgtatctatatttaatgacataaacatgtaactataatattttctttgaaaaagtgagcctacaaaacagcatgaatggtataatccaatttttgtttaaaaatagatggtgagcatttcttcagagtatgtgtgagtgagctgtgcccaagattgaaagcatgtagtctaaatgttagccaagattatttatgggtggtgctactagatgatgtgcattttcttttatacttttatatgttgtcttaatcttttacagtgggtatgtattactttcataatttgtgaaagccttaaggctatttttattttgaaacttaagtaataataatagctaacactttttgttttgttttgttttttgagatggggccttgctctgtcgcccagtttggagtgcagtggtgcaatctcagctcactgcaacctcggcctcctgggttcaagtgattcctctgcctcagcctcccaagtagctgggactacaggcgcatgccgccatgaccacctaatttttgtatttttggtagagatggggtttcactgtcttagccaggatggtctccatctcctgaccacatgatccacccgcctcagccttccaaagtgctgggattacaggcataagccaccgcgcctggcccaataatagctaacacttacagtgtacttaacgtcctagatacatgcattgacttggtgcattctcgcattgatcctatgtggtagatattattttcacagatgaggaacctgaggcacagaggggttaggtgatttgcctaacatcacagagctagtggagccaagatttgaacctgggtagcctggctccagcttgtatgctctatactacttgtcagggtggcggtgatcaaaaaattagttacacatgcctgtcctgatttggagagagacatgtgtagaatgctgtagagtccagccactgtgtgtgattgctgcctggatttgtgtggttagttgtcctttcataacctatcctttggtttggagctggcatagtaatttgtaaatcctggtactgtttgtaacaacagatggttttgtcagaaaatggccctcttcagattgctattcattgtttcctagcaacctatggctaaactacattttttttaattaaaaaaaaatcagtgtttttgaagtagtgttttattatttttgaaaaacagaagaaaaaaatttacccaccatcctactacctccactgttattattttgctgtttttcattccagtcttttttcatgtttatttctttcatggttgcaattttagtagtcaagtaagtatgcagttttgtatatttttttgagtatttaattttcctattagaataatacatgttcaatatttggtaaaatctaaagaaaatagacctcatctgcaagcctactatcagagttagccactgttaacattttagggtttttttcgcctagtcatttccttctagtagttgatatataaagacttttactaaaattattttacattgtttcgtaacttgcattttgcatttaatgcgaatgaacattttcttctgtcatttaacattgcaaacatgatttttatttttattttttattttattttgagtcaggatcagtctttgttgttgcccaggctgtagtgcagtggtgtgattacggcttactgcagccagcctcgacctccccaggctcaggtgatcgtcccatctgagcctcctgaatactgggactacaggcgtgagccaccacaccaagctaatttttgtattttttgtagagatgaagtttcaacatattgccctggctgatctcgaactcctgggctcatgcaatctgcccaccttggcctcccaaagtgctgggattataggcataagccacgacgcttggcctgcaaacataatttttaaaatgactgcagagtcatcattgggatgattgacgtaatatgtttatttcacttacatttttggtcataactgtggggatggtgttctgtcatcttgttttatgctttctcttttatattgcgccacactattttgaagatatatgtctcagatctgtataatatttcttccattaaccctgcttgtattgcctccctcgaacaaacttccccgaagtgctgagtatggagaggggaagataagagcattggtagtcttggaaatggtcccaaaggaagtgaaatcaaccccatttctgattttgccagttgttaattgtcccccttttaacagatatcctgggtaaagctgttaagcagtgtttaacagatatgttgcttttatatgcccacccctctaggctcaggcaaagcaacgagctggcagagctgggagaacaggcccagggaagtgttacaggttgtacacagaacgtgcctaccgagatgaaatgctgaccaccaacgtgccggaaatccagagaaccaacttagcaagcacagtgctgtcactcaaggtagaaatcactgtcttgttaaaatgggttggtggaacagtccaatcctggccttcataaatgaatttcagttttatgaaccttgttaaatactttagtaacctcatgaaagcagtccctttgagtgaaatgcaaatggctgtgataacagcctctcacggcaggtctggggctaagttggcatgtctgctgtgaacacacattttttcttaccataacaaccagcaggatattaggttgtaaaaggttctagttaggagcattttctaaaaggaaattagaaaaatataatcaatgccaaactgtggacacacacacctaacctcaaccactttagcgctcagatccaattctgttcttttagaacgagagaaaaccccctgttcaaaaactttgcaagggaactgtcagtacagatttcagactggctctcaggggcttggttttcattctgaatcattgttcttcctctctcagtccccagtgaggacttcattctcttttggcaggaggagctgtatgagtaatttcccagctgatggcgtttcccccgacactgatgctaccctggagccctggtactttctggtgcagagtgctctgttgtcatttattatttattccctgtcaaagaggctaaaacagagctttggaaagaaaaaagaaacctactccagtctctgaagtgccaacagagaggcatctgtggcttggacttcagctccaaactgcgactttgggcaagtttatttactttgccctctgctctgtgttctgctctgaaaaaggggctgttaatagtatttgttggaaagataagtgagataatgtaggtaaaggcacttggcacagtgcttgatgattgctaacataattcatcatagttattattcacacaataaacatttattgaacacctgctgtgtttatggtcacaatcactttatgagaaagaaatagaaagcttaggtcctaccacatcacactttatatacacttgaatcgtgcatcattcagtcgtttcttttattcatcgaattagctaatgtattgaacacatgctacatgccaggcatgtagattgcactgtggtggttttgtgaacatagtttttacccagtgtgaactctctgaaagcaggggccatatcctggccatctttatatccctcccacctaacatggtatgagatccctcatagatatatagtagaaatgatgtatgcaagagacaggacaagttggtagactatattattattattattattgtaaaatacataacaacatttactattgtaagctttttaaagtatacaattcagtggcattaaatacattcaagatgttgtacaaccatcaccaacatccatttccagaactttttcattgtcccaaacagaaactctgtacccattaaacagtaactcccctttcccccttcctctatcccttggtaactactcttctactttttacctctctgaatttgtctattctagatagcctcatttaagtggaatcatacaatattcttttgtatctgacctgtttctcttagaataatgttttcaagatttattcatgttattttcaaggtttatccatttatttcattcctttctaagggtgaatagtattctgttgtatgtatataccacattttgtttatccattcatcagcagatggacatttggattgtttctaccttttggctattatcaataatgctgctgtgaacattagtgtgcaggtatctgtttgagtctgctttcagttcttttggatatatacctagaagtgtaattgctgggtcatgtgctaattctgtatttagcctattaaggaaccaccaaacttttctacagtggctgcaacatcttacattcccaccagcaatgcatgaggtttctgatacctcccgtcctcactgacatttgttagtttctgttttttaaaaaaattatagccatcctagtgggtatgaagtgatatttcattgtagttttgatttgcatttccctaattactactgatgttgtgcatctgtgcatctttttatgtgcttgttggccatttgtatatcttctttgaagaaatgtctattcaagctctgtgcctattttttaaattgagttgtttgtccttttgctgttgagttgtacatattgtcattttgagagagtgttagggttttttgtttttttttttcttggaagacgttttatcatgttgcctaggctggtctcaactcccggactcaagcgattctccctccttggcctcccaaactgctgagattacaggtgtgagccaccatgcccaactgagagaatattttcaaaaagtttcctgagaaattatgtgctttcctttgggaggccgaggcaggcggatcacttgaggtcaggagttcaagaccagcccagccaacatggtaaaacgccatctctactgaaaatacaaaaattagctgggcatgatggcgggtgcctataatcccagctacttgggatgctgaggcagaagaatcgcttgaacgtaggaggtggaggttgcagtgagctgagattgggccactgcactccagcctgggtgacagagtgagactctgtctcaagtatgtgctttctattataatagtctgagttttatgtggcccagccctggaagttaccgccagtctcaccggtggcttcctaattgcaattgaagaaatgggaaataaagtaacaagtagcttccccacatgctgacactggctagactgaccctcttatcacatgccttcttcctttctgttctaggccatgggtatcaatgatctgctgtcctttgatttcatggatgccccacctatggaaactttgatcacagccatggagcagctgtacacactgggggccctggatgacgagggcctgctcactcgcttgggccgccgggtaagggacagactcaacttcctgtgcttttgggaagattccctggtcagcctttcacatccttcggtctgtacaaaatcaggctgaggccgtggataagctttgagtaaaattctaaatgtttgtttttaacctgaatttctccactgtcactttaaactgtttcttctttatacaaaaaggtgttctgttcataattttgcctgaggatgtattactgaatgtagccttaattagaaacggcatctgcaaaattctcatctaccccaacagtagttatatgcttggtcacatacatcccgttggagtttatttgggaaaagaataaacaacagcattcttctgatagagaaaggcatcccaaggcatcattatgctttgggaaaatctgtgttgttacccactctgaccaaggtcttgctctggtgaatccaaatgtgtcttccacagggaagcagttgtagtctttttttgtccctctagatggcagagttccctctggagccaatgctatgcaaaatgctcatcatgtctgtgcatctgggctgcagtgaggaaatgctgaccattgtatccatgctgtctgtgcagaacgtcttctataggcccaaggtaggaagttcagatccaagtttagatgggggtgccatgaagttggggtagttggcctgttgccattccaatgcttgatgtggacttttttttttttttttttttttttgagatggagtctcactctgttgcccaggctggagtgcagtggaatgatcttgcaatctctacctcccgggttcaagcagttctcctgcctcagcctccagagcagctgggattacaggcgtgcgccaccgtgtgctgctaatttttgtatttttagtagagacagggttgcaccatgttggccaggctggtctcaaactcctggcctcaagtgatcctcttgcctcagtttcccaaaatgctgggattacaggcctgagccatcatgcctagcctgatgtggacacttttgatagggtcttgtagggctccctagaattgctccatgttcagttagtagctgttgagtcggaaatgttcctctgtcccactgcttggcaggataaacaagcccttgcagatcagaagaaggccaaattccaccagactgaaggggaccacctcaccctgctagctgtgtacaactcctggaagaacaacaagttctccaacccatggtgctatgagaactttatccaggctcgttccctgcgccgggcccaggacattcgcaagcagatgttaggcataatggacaggtaagctggaatctgatgactctgcatgtttgagttgaaccaccttgagtatcatgtcttttcatctctgtgtgtacctataaagctataggcaccttttctcttgctcctcacataacccttttcctccagcttttccatctttgttatattccttctccccaagtaagggtatgcctgagaattacctcagatacctaagaggaagattatctgttagttgttgaaaaaaatgctctttgtttgcaaccctctggaacattattactgtggaattgaatacctgtctaaacaaagtgtctgtctctgagtgcctccgtctgcccactgtgtagagctgcctctgtagtacacttagggctggaaggaaggtcctggtgactactctgggcaccccaagatggatgtgttgggcactgtcattgtgaaaatagacctgtgaaagctgagtgggctcatatcttttgtcctatcttgatagacacaagctggatgttgtttcctgtggcaagtccacagtccgagtgcagaaggccatctgcagtgggttcttccgtaatgctgccaagaaagacccgcaggagggttaccggacactgatcgaccagcaggtggtctatatccatccttccagtgccctcttcaacagacagccagaatggtaggtggacatgtcccagggtctaggggcttttctgggcagagaaaaacctgtaaatttcctggtattttgtgattgtgtcttcactactcccagtatgtcctagtataacactgcttgcctttctagagcagcagaaacctgaattaggcacaatgtatcaaaccctatgagagaattaaaatcataggggtgagacctagttgaaaaaaaaaattgtggtttaaaaaactacgtagtggccaggcacagtggctcatgcctgtaatcccagcactttgggaggctgaggtgggcagatcagccgaggtcgggagttcaagaccagcctgaccaacatggagaaaccctgtctctactaaaaatacaaaattagccaggtatggtggcgcatgcctgtaatcccagctacttgggaggctgagacaggacaatcgcttgaacccaggaggtggaggttgcagtgagccgaaatcacccattgcactccagcctgggcaacaagagcgaaactccatctcaaaaaaaaaaaaaaaaaaaaaccaactacctaggggctaggcatggtggctcacgtctgtaatcccagcactttgggaggccgaggcaggtggatcaccagaggtcaggaattccaggccaacctgaccaacatagtgaaaccatgtctctactaaaaatacaaagttagccaggcgtggtggcaggcacctgtaatcccagctacttgggaggctgagacatgagaatagcttgaacccgggaggcagaggttgcagtgagctgagattgtgccattgtactccagcctgggagacagagtgagactccgtcccaaaaaaaaaaaaaaaaagaaagaaaaaaacaactacctagtgatgtagtttaaaaaaaaaaacttgttttaaagtagcatttttaaaaaattggactctatctagaaccctaatataaaactgatttaaaaccaccatgttatcacagtagaagggttagaaatgtggctccttgcatgtttggccttctccatcccttgtggcagtgtgaggcccctcttcagagccctagaattctgtggaaacattctaataaacatcctcacattttatagagcaagaaacagattagagaagggatgtgattggctccatgtcacttaactagttagagccagagccaggactagaatacattctcctgagacctttcttgtggttagaggtgtgcgggtgcttcagtattggggtgtggctgtcataaacagactgcagtcttataggtgtcaggcaggagaggtaatagtataaaatgtaagctcagctgaggcctactagggaccaggttgactgtagagtggggcctatatccagaggcttgagtactatctctgtcccccctcagggtggtgtaccatgagctggtgctcaccaccaaggaatacatgcgtgaagttaccaccatcgaccctcggtggcttgtggagtttgccccagccttcttcaaggtctcagacccaactaagctaagcaaacagaagaagcaacagcgtcttgaacccttgtacaaccgctatgaggaacccaatgcctggagaatatctcgagctttccgacggcgctgaaaggcaagattgttcctttgcctctccagcagcagtagccagggcttggacttatcgatgacaggctggtcctgaggatacagctgtcccgtgactgactgtcttaactgagcattttctcaactcgactctcatttcttccctgctggtaaaatagaaacagggatttaaacctggctttggcaagagcctgcagcctccatcaccccaagtccttgggcccagttgggagctcatatctaacacagagacacattgcatcaacttcaagaaagggacaatttgtgcagctccaggatgggaaggtggagtgggtgagcatcttgtgcagggacatggtgagtgccctgatgccccagctagcaggagctactgtgctcatctaaagtgtttgccccacttcccaccccgtctccagcccctgtactttggcttgacctcgtggaaatatttattttcttaaggaaacaaaaatggttttctgtgactgttttcttttagccgaaaggttaggatattggcctgggctcagggtgagggagatttagtatctgtgctctggcacacatgatgagaatcccctgaatcccctgaaaccagaacgcagggcctctttgcgctcggaaacgacgtacaacccagacttccagccttgtctttcagcatcagcactagccgggccgtgctgggggatcacccgatgatcaaccatgtcctctccacagagcacttcagtctggaggcctgagtggctacagatggcacatattaaatacagaaggtttccccttgctccctccacctcccacattcgcaatgtgcagcatgtcccatttccttttgaaacatactaagtaacaacacagcttttattttattttgtttttatttttttcccctgaggtcctggatggactttaacaaagggattttatggtcaaaacctccctttccccactccaaacagaaaacaaacataacacctctcctctcagctggtttgtgctgccagtatctgtgctgcagggcttgttcttagtggttttttcctagcacttgcttggagaatagccacctccttgtgccctcctcacagctcctgaggagggttttttttttttcttcccatagagatgggttcccactgtgctgcccaggctgctctccaatccctggcgtcaagcaatcctcctgcctctgcctcccaaagcgctgggattacagttgagagccactgtcctctgcactgaggaggctccttacctggcggaacatcaggcaggtcttgccaggccaggtttcggaacttacggaaagctggtctggatgtagtgcttgtagagaagcttctgagagattgggcacatcctgttacgttgctgcttctcctgtccttatgttattagtaagttctgaagtgatgtaaatgctagaactactgtagaactgtatgccagacactaagagagactatgtaacattccaggatataaaggaatgtatgttgtcactgggcagcaaaccacaccctaaagacaattcagaaagagtccgagggagaggaatataggccaggcaatctgctggctgcagatccctgccccttcattaagctgagtgcctcctgattctgtctgagtattcgcctttgtaagcccaggccagtaatcaaggggcagggcattgttgtgtgttaaccttgaaggccttctggggagagacagtacagggacctcaaatgaaaccaaaggggaaacggggactgggcacccacctccccaatctcgttttgtttttgtttttgttaagacaggatcttgccatcttgcctaggctggcatcaaactcctgagctcaagtgatcttcctgcctcagcctcctgagtagctgggactacaggtgcatgccaccacacctggctcccagtcctaattccagcctaaattttccccattcagaaacactcctggatatagtggcccagcctgtcctgactgagtgcccagcactgacaatgttgacacctggggagggagggttgggtttcaagctgaggttgaaaagggatgttgaatgggctaaggataagagacagcagggttcgttatcttttctggctcaggtggaggaaaaagaaggatccccattctgtgggtgttccttgaccatctctctacgctagagctgaggtcacttctctgctatgacaacatagctgggttctgaccttttgaccatcaggaaagcaatgtcagcagctgagctgagcctgctctgagggagaaggggggggtcctgtccagatgcagaaggggagcttgcctgctgctctcacacaatggagcccttgtttctcttccttgaaccagtatttcccaagattgagtgacagcccaggagaggatgtgggtctcatgcagagagctgggatcttcttggccattaaagtatattgttcacccccaccccgcgagaaccaagctcaggagttgcctgcctctgcacacatgctgagtgtgctgtttgtgtatatggcaggaccgtccctatggggcatgtgtgagctccgcagctgggtcaggctcctcggtccaggtttacttcatcccgcctggacgtgatttggctttgactgtctctcctgcagcccaaagcacttcctccctgtggttgctgtagctgtctcattggagcagtgcctctccaagtttgaggatttgaacaaagaactgggactggtgacttgttaatgaacagttcagagggcagagggccatcatctcagcttgtggagacctttctttccctggatgctgcttctcagctaactccctctctcttcgtgtgtgtactcggccttcagggtttccaccgatttttacaccttcttcccaccacgatagcttggctttaatgtggaattaaattatatatttttaaaacctgtttttaaaattttgtttcttgcactaaattatgtcagtacattgatattttgtgtttctaggaagaagtaatgttgccttttatttgtgggtagtagtcgaggggcatcccttcctgcaagggatggtctcaggttggtgctgggccaacctgagacatgaacagagttgggctggcccaacctcagcacagctgcagtttctatttaacaggagagcaccggtttttacctgagcatgtctcctgggcagcggtttacatagcagctggctctagaaccacccattctgcccctcccacctgttgtcacatctcagtcatacgtcctccataggtgtcaccatgttgtccactttgccatttctacctacccccaaaaaactcagcctcaggactctgatctctcccaaatttgggcaaggagaatctaggtgtttcccactccccggaagatctaatctccactggccagaatccagggcctgctctagcctctctctgtaccatctggcctgggagcctttctcctttgccccattctccagacaaacacttgtccccaaccccagcaaaagtagcaacctagagctgaggtaggagggaggacatgcaattggggtctatgtgggacagcagggtcatgggaacaactgggatcacagaaaccaaagaccaaaaccctgtctgaggaagtcccaggagggagacccttgccactcagtagcccacctgacccgcccacaggggcagggagactgctgctggaagcaggcccaaagtgcacaaggggcgcctgtccaggttatcaagtaccccctgtccattatttctggatcctcacacagtaatgctgggaagggggaagggcaggtatcattaagcccatttttcagaagagaaacagtcaggtgaactgccttttttcaaatctacatgaggatttaagcgccagggcctggccccaaaccagtcagctctgcttcaagaccagagctctttctacccccaggtctgttcccacatggcagcaaagaggacacaggagaactaatgggagaagtgggggcctttattaaggtctggcagatgtggtggaggtggaagtacaaacccaggcctgggcctaggaaagggcagaagaaaggcaaagggtcccttggagcaggaacccatccctctctgcttatacccagcacccctcatcccaggttcctttcttcaacctccgcctgcctctgggaacacagagcaccaagaactgacaaaccgggaccctccagggccacagcgtggggcagagtccaggcttctgtctccccgcagtgggagatctggggagctcagtgaacctcctcaccctcctgccagtatgaagttgggaagcgccttctctgtcccccagaacagaacaaactcttgttctctgtggttggggaaaaggtgtggggggcttggacctaggaagaagctgagctgaattcctccagggcccaggtgaaacccccaggggagtttctgagactctagacttgccatttctccacttttccttcccaatgactccggtgagcagctcagagtctgggctagggcaactggtaggacagtggggatctgccccagagacatctgtgggtttcagatgaaggtttccccaacaccagattcatttatatgtacacagggcagcacccacctgcggcagggggaacagccgctgggggctagtaagagtagccacccttggggccaaatggctgggcggggccagccagctctgggaggtaggcggggctctcatccaagtgggacaaagggactgtgtcctcctcactgacaggccggtcaaactcagccttgagagctggacgctgattgtccgggaaggccaaagagaagagggcctcgggctcacacacaaacttgtacacgtaacgctcaccagccacctatggggagagagaaggtctggtcagcctggctagccgcccagcctttgtatggggtaaggtgggggagtggggaatgtggcccttctaccagtacaggcagatgctcggggcatttctctcccatgctggttcctgagaagctgactctcccttcacagttcttactcctttttcatctcaacttctccatgcttgggcttctcagttacagtgttgcacttttttgggggaggagaaccttgggattctccacaatttcttgtctctctgactgattcattatctgatcctacaaagttgctgagaactgccctgctgaccctctccccagtcagcttctcacagccactgccccccaccaccttgtccctagacccacagcccccaccttctgcatgatgcctttctcataatagtatcggagcgagcggctcagcttgtcgtaattcatggctggccggttcttctggatgccccagagcctggcgacctgggaacaaaacagttttggggtagagatgctaccttggcagaggaaaaaatgggggtaaggtcagaaagagcacttgagattcttggtgcaaagtgccaagctagctctgcaacaaagcatcagcccacagacttaggcttggcaagaattcaggttaggtaaagcaagaatcatgatggaggcacgtgccaccatttcccaggttctcccacctccaggctgtaaactttggaaaggagggctgggaacatccgagaggcccacctcctcaggctcaatgagcttgaactccattccccggcccgtccaggcaatgaaatgggcatttgttgggtcatccagcaaggccaccagaaattgccacagctgcagggcaccccggcgctggtagggcggcccctctcgaaatgcaccgaccccttcctgcttgatgtctcctggggaacacgaaaataggaggtgtggggtttgtgtcttttggtcccccaagcaaccgcctcccacccgagggatttctcgaaggggtctccccaggtacttttctatgggtcccaccctcttgcaacaatgaaacgtgatgtgactcctgcagggacacagcgtgataagaccttgaccctcccatcaacagtcacttctctgaccttcaaatttctcagggacaacgcagacatcatctgggaatggtcgcagaggtttctcatagccatagccttgtggaggaaattgggggttgctcagatctgggggttcaccgatgagaccccagagagtccagagggactcctggccagggagaccctcccccatggcagcgctccctcccccaacatggagggcttggcaggggaaggggggctgccttacccatggccccgtcacctggagagggcccagagaagccctctgtgtggaggtacattgatgcgcacccggtgacatctgtgggggaagaaggggtgatgtgagaagtggcttggggtggagctcgagggcaggggaggaggaagtcctatccacattcaagaatttcttccttccagcctgcttcctggtgactgttctttgcccaggttgcctgccaaccacaaaatcccagggaaagttcacccagagggagtgtgatgctggaacccctcctcaacttgagggctgcggctgaggccatggaaggcagcagcgggggctgggcaagctgttctgaagggcccaagctgccagggagcagctgtttcctgcgagttcagggggaggagggagggtgagatgaacgtccggggaaagagttcggtgtccacgcctaagactccctcagaatggacaaaaatgtccggtcagcaggtcaggttcccagccctgtgcacgcgcgcgtgtgtgtgtgtgtgtgtgtgtgtgtgacagaaacagagcgtgcgcctgcatgcacctggggaagaggcagtgggcactgggccttgttttttcaggtctaacagagcacattccacttcgtttcattccattccataggataggaaccttcccactccacatcgggaaggcggctgtgtgaagccacccgttcaagttccaaccccttcccgccctccccccactgcactcccacctatgaatgagaagatggtgaaacatgacacctccgggaggaggcgggagggtgggctcattcatgcctccattttgtgaatggaattcctgactccattcaggagtagctggggggaggggcaggagttcaagggcatgtaacacaatcccctccggtctacagcctttgaaggtcagcggcaagagtgcctccctcctcctctccccagctcactgccaagcctggctcaggcttatgccctggatttgaggacaggagcaccatccggttcttagttggacagcctggggggttgtggttcatccccctgcccttgaacggttgtgggcaccacaaaaagggaaattctaaagttctagctagctctgggcctactctaataaactcagatctagggctactaatgtaacaaaagccaggaggaaagaagaaaaggcagggttttctggacccttcctgggactggccctccttcggcccttgaggctttgaactatagctatttatgaacacaggtgagtgcatctcactccagtcaacagccaggtggaactagaatttaaagaagtccctacttcctctgcccttgcctctggccagggcatacatcaattgggaggctcaaatatgtaagccacatattaacctgtgcttctaccagcttgatcaacatggtgaaaccccgtctctactaaaaatacaaaaactagctgggcatggtgatgggcacctgtaaccccagctattcgggaggctgaagcatgagaatcgcttgaacccagtggcactccagcctgggcgagagagcaagactccatctcaaaacaaacaaacagagcaagactctgtctcaaaacaaacaaaacaaaacaaaacaagaaaaccctgccctcctattgagaactagcaagaaccatgagcctggctagtttcaaattcatgtttctcttcattcaaatccctttgtatttttaagcctctgtggggatagggaccagacacatcctattcatctttgtatttcccaactctgcacactcgtgttcctgtcacagtagtttggtcttaataggtaattaaaacctcaaacacctgttaaatagaaataaatgccttaacttccctattaagtcacaagctacctgagggcaggatctacatccccctttattttaattttacttttttataaatagacacgaggtctcactttgttgcctaagctggccttgaactaattcctgggctcaaacgatcctcctgccatggcctcctaaagtgctgggattacagatgactcaccatgccccgggggccccccttatcttttaatctgaatataggtttgctcattgaaaagtaataatttgtccgggtgaggtggctcatgtctataatcacagcactttgggaggccgaggcgatggatcatatgaagtcaggagttcgagaccatcctggccagcatggcgaaaccccatctctactaaaaatacaaaaattagccgggcacggtggctggtgcctgtaatcccaggtactcgggaggctgaggcacaagaatcgcttgaacccggtaggcagaggttgcagtgagcagagatcgtgccactgcactctagcctgggccagagcaggaccccatttcaaaaaaaaaaagaaaaagaaagaaaaataacattcttttgaaattatgaagaaaaaaagtgggtgggtgggttggatgtatgaaatggtaaacagcaatgtaaaaaaactcgggagacattctgggcttaactgaacacttgatcacatgccaccctgccccaccccagtctcttacctgagtcgtaggcgaagtccgtctgttcctgtttgatcaccacccccgcccctgggtacctgtgcccattgaccccaccctggtccacggctggctggcccgcctgttcatacaggggatcatggtattcttgcttaaagctctgctggggatagggtgggcagggctccgacagctggtgttggtagggggctgggaggggttcccggccccctccctgagatgtgaaggagtggcaaatgtccaggggctgctggaagacggagctggatgtggttggatggagaaggaagagaagagaactttaaattaatccttcctcgagcctgttactcctaggcttttagagtgggctccggaatggggggtagggggttggggtgtcagtatttctccctttctattccactgccccctgcctctaccaccccacagctcaagtctttatggagaacactcaggaattgaaaaaacacctgggcccatgagcagtgggtttccctgtctccttacctatgttccccgaggtacccatggccagggtggggctgggaggtgccagaggatctcaggaaattccgttgctctgcccggggaaagggctgtaggggcgactgtccaagggcaccaggggcaggggacttgatggcgatttgtctgggggggtcataggcactggagttgagaaggagacaggggtgagggggcagagaagctggaaagcatctttgaacccttcattcctaggaaagcgaggtcacagggattacaggagaaggaaggatagagggggctgagaagggaacggcaggagccacagactcagccctagccaattcttttctttttcagagacagtctccctctgttgcccaggctagtcttgaacccctgggattcatacaggggggatttgttgctcagagcaatggtttaggtgggacagtgggcctcttggtggaaacagaatctgctctggcctcagtatatattcctgaggccctctgctgcgttttccgtctattcagaggaaatccttagctgtattgcttccttacaagtgctagaaaatcctttctgttgtctaacttgcatctcagctgctgcctctgctcatgggtgccccctgcctccctcctctggaacccttctcctacccttcaccaggtccaggctggggctcacctggagtaaaggcactgctcgccatggtggtaggggagtggcggcttcctgctgcaggacagggccgggtctgtgcggggactctggggctccttcttgatcctggtggtggggctgtggaaagctactgtgggggtggaggggacagagcaaggccagagcctgtcacacaagaggcaggcagggcttctgataccttctgagctttgaggaccagctgggtgactggtacagcctccttccctctctgggtatcaattttctgagacccgcagtgagacaagaacattttggctatttacattatgtctagtttatacatcagactagtgtctgattattgactaaataaaccatctaaagttcaacatttaggctgggcacggtagctcacacctgtaatcccagcactttgggaggcaggagtccaagaccagcctggccaacatggtgaaaccctgtctctactaaaaatacaaaaaaaaattagccggggatggtggcggatgcctgtagtcccagctactcaggaggctggggcaagggaattgcttgaacccaggaggcggggattgcagtgagccgagatcatgccactgcactccagcctgggtgacagagcgagactccgtctcaaaaagaaacaaaaaacaaaaacatttaatgcaaccccaggccccagaaaacactttcaaggagtgagcacctccaacctagggcctgtagttttcctgagtgccctggaaaattccaggggagtgacatgttttcttatttgaggatataaagaatctttcttggccgggcgcggtggctcacgcctgtaatcccagcactttgggaggccgaggcgggcggatcacctgaagtcagaagttcaagaccagcctgaccaacatagagaaaccccatctctactaaaatacaaaaaaattagccgggcgtggtggcacatccctttaatcccagctactcgggaggctgaggcaggagaattgcttgaacctgggaggcagcggttgcagtgagccgagatcacaccattgcactccagcctgggcaacaagagtgaaactctgtctctaaataaataaataaaagaatctttctttttctggttgaggttggatattggcccacttgaatgtcagctgactaacattatacacatgctcctacttatctgtgaagaacactggcctttcctgtggcccctgcggggttcccaaactctggccacgaggctgagcagcaaagagttggttccaagccggtgtgagattcagttttaaccgcagtccagtcaaatgccgtttgtaaccaactattctctgctgtttttgattctttgtgccccattgtttcactggtgaagacagttgacagcaaagtatctgacattaaagcagggtttgttttttggtttttgttttttttgagatggagcctcgctctgtcacccaggctggagtgcagtggctcaatcttgcctcactgcaacctccgcctcccaggttcaagcgattctcatgcctcagcctcctgagtagctgggattacaggtacacgccaccatgcccggctaatttttgtattttagtaaagacggaatttcatcatgttggccaggttggtctcaaactcctgacctcatgtgatccacgcgcctcagcctcccaaagtgctgggattacaggcgtgagccaccacacccagcctaaagcagggtttctcaacagtggcactactgacctgtgggccagatagtgttttattaataatattgtaaggagcggtcctgagcatcataggatgcttttagcagtatccctggcctctctatccactagacaccagtagcaccccaccctcaactgtgacaaccaaaaatgtctacagatattaccaaatgtctcttgggaggcaaaattgtccccagtttatggaagtgacttagaatactagaactgggggcgggcgcactgggctcacgcctgtagtcccaacactatgggaggccgaggtgggcggatcacaaggtcaggaattcgagaccatcctggccaacatggtgaaaccccatctctactaaaaatacaaaaattagctgggtgtggttgtgcatgcctgtaatcccagctactctggaagctgaggcaggagaatggcttaaacccgggaggcggaagttgcagtgagccgagattgtgccactgcactccagcctgggtgacagagcaagactctgtcttggggggaaaacaaacaaacaaacaaacaaacaacactagaactggactctgctgaactggcccaggcccctcacttcagatataaggcaatggagaaccagagggatagtgtctgctctaaggtcacacagcaagaacatgtcaagccccagatttcaaccaaggttttcattccagttattgccttggtctttaagatcaaaccccactgtgttttaggagagaacaagctgctctcttgtgattctctatcctatgactcacttcctgccatcctccactccctataccctctccccagggacctctactcacggttttctgaatggaaatcaggaacaaactgctcatcactgtctggtacctgagctgcagagagaagtcagaggtgagtttggggcggagccctggttgtcccctgggaggctccattattacagccctgcagattagcaacagccaagaaaggaccaacagcctttagatcaggggtgtccacattgtaagaattgtcttgggccacacataaaatacacaaatacactaacactaacgatagctgatgaacttaaaatcacaaacaaatctcataatgttttaagaaattttacaaggaatttatgttgggcctgggccgcattcaaagctaccctgggctgaaagtggcccacaggcccacgggttggacaagcttgcttgagactaaaggctgctccaccctaggtcctagtgtcttccacctctgggctccactaagacccaggagggaagactgttctcagaacctgtctgagcagattccagtctttcttcttctagatgctttgtctttatttcctccatttttctgaagtgaaacagcctcgcccctcagagtttacaaaactcccttaaagctcacaacagtcatatctaggatgggcaggcattataagcagtgggatcctgtggatttaaaaatcacataggaggcggccaggcatggtggctcacgcctataatcccagcactttgggaagtcaaggcgggtggatcacctgaggtccggagttcgagaccagcctggccaacatgacgaaaccccatctttactaaaagtacaaaacttagctggtcgtgttggcgggagcctataatcccagctactcaggagctgagacagaagaatcgcttgaacctgggaggcagaggttgcagtgagctgagatcgcaccactgcactccagcctgggcaacaagagtgaaactccatctcaaaagaaaaataaaattaaataataaataaaatcacataggggggtggctgggcgcagtggttcatgcctgtaatcccagcactttgggaggctgaggtgggaggatcacttgagatcaggagtttgagaccagcctggccaacaaagtgaaactcccatctctactaaaaaattaaaaaattagtcaggcgtggcggtgggcacctgtaatcccagctactcggaaggctgaggcaggagaattgcttgaacccaggaggcagaggttgcagtcagctgagatcatgccactgcactccagcctgggtgacaaagtgagactctgttccaaaaaatgaaaaataaaggccgggcatggtggctcatgcctgtaatcccagcactttgggaggccgtggtgggcggatcacgaggtcaggagtttgagaccagcctgaccagcatggtgaaatcctgtctctactaaaaatacaaaaattaggccgggcgcggtggctcacgcctgtaatcccagcactttgggaggctgaggcgggcagatcaccaggtcaggagatcaggaccatcctggctaacacagtgaaaccctgtctctactaaaaatacaaaaaaaattagccgggtgtggtggcgggtgcctgtagtcccagctaatcctgaggcaggagtatgcctgaggcaagagaatggcgtgaacctgggaggcggagcttgtagtgagccaagatcaggccactgcactccagcctgggtgacagagcaagactccatttcaaaaaaaaaaaaaaaaaaattagctggacgtggtggcacgcctgtaatcccaactattccggaggctgagacaggagaataacttgaacccgggaggtggaggttgcagtgagctgagatcacaccactgcactccagcctggcgacagagcaagactccatctcaaaaataaataaataaaataaaaaaggaggatgacagtgggagagcaggaggctggtgactgggaccactgcagaaggcaaaggacactggctgagtacataggtgcctcatccccttaatgtgcagctaaggaggggagggattcccaaggttggtgatccgaagagctctcccaggatgccaggatgggtggagctgggttggggaataggcaggaaaactgaaatacagcagcagctcatccatggcttctaacctgaacatcaaactctgatttctagttcttattctggcctccccagagcggggcttctcaggtggttatacagctaagaatctcccttgatcccagagtcttggcccacttttgcccctctctcaaaaataaatggatcacagcaggaaatgtagacaccaagaagaacttcctgatattattccaggaagagagtggttctagggtgatgcagtggaacctgtagcccgaggaggctggactctccttccctggagactgctctctccttccctggagactgctctcagattggacaatggggaaactgataaaatgcccagagaggtcaaaatggctggtgaggggtatgagatggctagaaaaaacctccacacccccggcctatacaaatacatatcccatctcttttgcttctctctaggctaaggctccatcatttcttacttggatttcacccacggcctcttaccaggataccctattttcattcttacctcctatggtcccttgctctccacctaggtgtcacagtgatctttttacaacagaaataaaatcatttctctctgttatttaaagcatgaaatccaaacgcttgcccttggcctccaaggctctgcatgacttggccttgcctacctctctgacctgcctctccttgcctgtgaatctgcagcactctggtctcctttctagccctcaaagctgctgagcttgttccttcttccccagatgctttcttgcctttttctttttttcctgaccatcagagtctcagctcactttgacatctctggagaggccttctctgaccacccctaaaccaaagtggttcctcctggctctctattgcatctatgttttgttttctccctggcacatattgccacctgaatatattaatttatgtttacctgtttgttatctacctatctcctccaccaggaagttaagctctgtgagggcaagagctttatcttttttgtcatctgatgccccagcacccagcacagggttagagtagacgctcagtgctgttatttcttgactacatgaataaacatgcaataatcgtttgtcctcaggctggcagaagtcagcactgtgggcctgagggcatgcactgaagagatcctgaccatcctagcccttccctgcaggctccccctctccacacacaaggcaacactagaggcaggtcctctccaggaaagcacatctcacaggggatattttaggttgtgatatgttgcttggcaagaatattcttcaacaatttgctttaaatatcagaggtgccaagtgtttataaacataggcttatattaatagatagttgatttcttgacagaagcattagggagagggagtttaacaatcacaagccaccagcagctaaacgagaacttaggacaagtcaacataataatactttggtctgaagtgaccaaagacatcaatgagacatgaaatccgctggcaagaacaaacagaaacacacagccagcacacatcttttcaggagcacaaacacggcaaaaagacaaccattcccaaactggcctgattcaagagtcaccaggacgttgttaaaaacacgattacagccaggtgtggtggctcacgcctgtaatcccagcactttgggaggctgaggcaggcagacgatctgaggtctggaattctacaccagcctggccaatgtggcgaaaccccatctctactaaaaatacaaaaattagccaggcatggtggttctcgcctgtaatcccagctactctggaggctgagacaggagaatcgcttgaacccaggaggtggaggttgcagtgagccaagatagcaccaatgcactccagcctgggcaacagagtgagaccctgtctcaaataacaataataaaaataaaataaaaacacgattcccagtcccctcctccggagagtcccattccataggactggggtggggcccaggcatctgcattttaaaatctattataaggaagtctcctgtgtcaggcttgagtgcagtggcacaatcagagctcactgcagcctctaactcctgggctcaggtaatcctttcacttcagccaccacaaccttaaaaataggcacatttggatagagggtaagaggccaaatctgtccacctgcccagggatgcaaagccaggctccccactgtgccctctggtccattcagaggcaacatcccccaaggtggcaggaagctggggtgatgggagcagagtgaccaacatttccctccctcctactaggcaagaagggtcccaagggaaagggtggtgcagaactcaggggtggctgacgcattccggccccacccctggggcctcattaactgctactttccattgaggtaatgggctgggggtatctcttgctggcgtcactggtgctggagagcagagaaccctcagcatcatcttgcctttcttcctgcctcgggcctgacagtttaaccagggacccctccaggcccggaatccaggaggaggcttcctccagcacacagaccacaccccaaaagaggtggtgccatcctcttcccagagccaggagaaatctgtcctagctcagcccctcccccaaacactggccttctcccaaaggggtaggccagggccctcagtcatccagagactgtcaacaggatagaaacaggaacactgagcctcgcgttcctggagagcaggagaatttttaattaccatgtttcgtcttaagtgtacaccactctctttatttatttgttaacttggctgagtcttggctgccaagccagtgtgccagggtctgtccccagctccatcccggtactaagatggagtttatctgtctggggacgaggcagatgattaaggagggggtgggaaaagtgccaagacagcataatgcccagagagagagaaagaattttagggactctcctttcaaaaaggggggttagtaaaaaaagaggaggggcttggggggtctcccaagctggattctggaagaactgagaggttaaaacagagatacactgaagctcaccataggttagccacccacactacatatgctcggtcaccctcttcccaggatccagtcatagggtgaagggggtagaggcattctccagagcttctgctccattgtgtcaccgctgtcccttaccctgcccccaccctggcagcctctgtactggaaggaaccagttcactagttgtggaggggacatatttgtccccaagagtcttcaggaaggggaagagacagaaagatggagaaggaggcattgtagctgggaaagattagggaggagattaacctcatccctccccacagacatgccgaggcaccagtgtacatgcactcggacgcatattcagggatgcacacaccctaattccttttacttcactcttgcagcagcaagacagcacagggtgaaatgtgccctccatgcatgccctccacacatggggtctttttttgacctacaaatatgattgggacagccaaagggcaaagggactggagcccttggaggagggttggggagcagtgattcctgtgaaaaggggagcgcagatcgatcgatccctttgagaatctgataaaagctatgggtcattctcttcctaaaaaaatccatacacctttatgtatggtgcacttccagcaattttacacacagtatcagagggatcaaggatcccagcaacctatccatagggcttctgggaatccacagacctgagcctcacacaaaggggtcatggcctagagtcaatggcccttactaccaaatagacaacaaagtcattttccccaaggattcagggctcctgacaagcctggaaaggaaccttggacaaaaaaccagcatatcttttaccatagccagacacatattgggctcagcctgcctgagcctgggtctccctgtagcagcctgattctttccccaacatctcaacagatcccaggcacccccaaatcagacacgccctcctagcctcacatcattcacccctgtgtacaaaaacccaaccccaaggatatgtgagctgcctccataaagccgcactcacactcacccttcaacgcccggacgcaggacactgaacctgcaaccacactggaatcttcctgtatctgcccggctccaacctgtgcctcctccaaatgctgtcttcacagacccacccacactaccaggacccccctgctgcttctcttcaaattggggctttggaaaaaaccaaactgagaaagggaggttgggctctggtcccctttcctcctaatgcgtcccaccactggcaagtttccaaagaagctagtccctccctgccaccccaaagctccccatgggttgccggggtcactgacctggtgggaagagacaggagaggaggctggggtggtgttgggatggtgcagggggacagggccccggcagctgcatctgtctccgcagagaaagtgagaaggagcgatcggcctcagcatccccccctcagacctggccatccatcaccagctgggaacctgagctgctccctcagaaggaaggagagggaaccaaggagatcccagcgcccacccccctcacctccgccttgcaatccccaccccacctccccacccactggatttaaatgtacagggcagcagcatgtaactaacacacacacactctctctctctctctctctcacacacacacttgctgtcacaccgacactgacacagacagacatttgtaccctctccagacccctggccaaggggtgggacttccaaggtagagagatgagagcattttcctccccctcccatctcaaacccaggcacagatggaccagctgctgccaaaatgccaacctcagcccacccctagctcacagccctaggagctgcccactgtggggactctcagctgacaggcaaggaatgaagcccggtgagccagagagaaatcaggcactgggaaaggaagtctttgagagcccacggaaactgacacctctgcattcttcagctctagcccagctccagaacctcagaagaaggatggggagacggggcaaagctctgcctgtaaattggagctgggcatgcaggacttgcagggtcggggatgatgcacacaataccctcagaacctccagatccctccagcactcacacagccattcagccattatttccacaaaatgtcttgagtgcttgctctatgctaaatagtcattctgtcaacatatatatttttagaatatcatagtgggcaagacagacctagtctcactccaaggatctagtcaggggtcattttctttttactccgagcttctatggagagttccagggtagttggatttgagctttaaaaaaattagatacccagggtggagggatgaggagatcctaaggaaaatacctcaaaaagacctcaaaaaaggagttcctagtgttttggcttcttcattttcatagtgttaaaataaaccctaagatgggggtagttaacccttccctctcagagactgtctaaaccaccattttccctcccacctgcagccccaccagcgacaccctcaggccccaccaaaacgcactgaagaatccaaccaggaaacctcctgaacacaccacttccccatcagacccagccacggacccagccacggaccccaccccagccagctcacagctaactccccagcacacaggaaggggggaatttgcctggaggcagaggtattcaagcgggatggaagagggaggaacacttgctattagaattacaatcaaggctatttggggagggagccctgggctctctgtgccaaaggactgccgaaaagaattatttaaacttttgttgttcttttggcttggacagtaaattgtttggtgctgggggttgggaagaagagaaacccaggggataagaatcaatgcttgggcaactctggaggatgagtgacaaattaatttctccccccaccccccaccaacaacaccccaacatgcaccttggcctggcggcttctgcaaaacaaactttacaaatgaaaatttcaaccaggaaaatgggcctggggccaagttccattcaaataagcaaataccccacacaatggtctgattcatcctcaagcctagttacacaagcctggctcagggtagagaaaataaatatcaatataagtgtccacgctgggtgctggggtgagtagagtggcaagggacctggggagagggccttggagaactccttgaggcagggaagggagaggagaagtgtagggcttagggtggaataccaggggctacggagtgtccccctgtccagcctcccaaaatagaaaaggtcacaaaactactcaccttcagcgagccacgtctcctggaagtgacttagatcctggaagagatctgaggggtaaatagtggaattggaggtgaggtggaggggacggtaagagagaaggggccctagcaagacccggtgactcccctgccttgggagtagggaccgagaagaatgaccaaaatcccttggagggcgagttttttggggaaacaggcgggggttccagaatcggccgtgtgtgtgtgtgtgtgtgtgtgtgtgtgtgtgtgtgtgtggcggaggagggtcgcggtttgtctctcttgctctttaccttcagagtcgaggggcggcagggagcccgggtccatgagcttccccagcgggccgatcagcgcttcgcgcaagctcccatttccgggcgatttctgcgagaagcggggagaatgcccgcgagtcaccctgaggcgcttagtctgggggacgaggttggggtcctcgggtgactcaggggcggggcagcccaggactccgctgggactgcggggaggggggctgtggtgagagtaggggctgggtgcggggcggggcgggcgtggaggccggcgcggcgctcacgctgctgaaggtgtagggcacttgctggtccaagtatccggctttcatcctccgctccatccggccgctccctccggccgcacggccggggccccaagcgggggccgagacctggtgggggagggggctgcgttcgcacaccgtccagggagggctgcgatgggggcggggagggggcagtcccaaggctctgggtccgacggcgaaacttctccgactcactggggcgatggcgaggtttccgcctgccaggccgagcgccaccaccactcccctcccgccaaaggccaaaggaggtcccacctgctcccaggagccgggctcgccgtttctgctttctgcagccctgctttacccgggctcggttacataagaacgtgtgtgtgtgtgtgtgtgtgtgtgtgtgtgtgtgtgtgtgtgtgtacgcgcgcgcgcgcggaggagcaggcgaagcgcacaccatcgcatgcccacaactcccgcgccccctccaaccctgaatcccagcacctcccacccccgccctggaatctgcggaggcgggtggtgagagtgagtgtggtgtgcattggaggcgaggcggggaatcacagacactctccctccctttccctcccgcagcctcacctgaggccggggcgtctgggctggagccgcggggggtcccgagcatgccctggagcccgcaccgagggccgcggggctaggccggagtaaggcggccccggccccgggtccccagcgcaccgacttgtttttcgggcgcagcagacagttgtgagcccgggggagcagctgattggtgcatttccttcgctcggcctcagctctccaccccccgccccgccacaccgccccccgtttccctttgtttcattgacttttgtgaatggaaccccagggctgggcacgcccgccaatccggagagtcgtccggcctggccggggggcggagtttcccagccgcgggggccaatcagaatgtaggggttggctcccggcttcattcagtgctccggctcccattcataaaaaaataaaactcgcggctggagttcattcataaagaaccgagagaaaaagagagaagccgaggaccccgcggcttcttcaccgtctcgccacggtcttgggtctgatgcgccgcgtgctcctccggctggcgtctgcacacgtctctgcatctgcgtgtacgtgggagtatgaacatgtctgtgtgcgcccaggagggaggcgaccgggcttgtgtgcccagaggaacaataataactagcatttatgaagcgctccgcttccacgtgctcatttcgttcccataacccggcgaaatggatcgtttgtatcttacagatattaaaaatgaaactcagagagggatggtaactctcctgaggtcactcagctagtcagcacctctggggtttacagcctcaaatccctcacactctcctgtacacccctctgaagccatgattaaatgagttaagctatgtgacaactgatacacagtaggtgatcaataaatgtaaactggcacagaatccaggcttttcctcaagggtctgttctctgcagagctgttttgtgacccactttctactgattgcagcagaaaccagaagccccagggtagatgatttccgaaagtgtagctccctctcagccatcttccctcttatctgagagccagcaaaaggagcaaaagccccaaaggttctgatgatctggaggcaggatgggtttcagttttagctaagaagctggtcatagtctctgtcatctcatccattcaccacttctttcaataaacatttatcgtgtcagatacagtgctgggttccaggcaagcagctatgtccaagacagacatctgaggggacctggggtgcttgggctgtggccatgggggcacaaaggacatgaatcctcaaaggcctttttgctgagacaattctctatgtctccagcctatgcactcctttgaggacagcctgattttttatcctgcctgtttgtgataaacacaaaagaatgttcaaatgccaggccagcaggagtggcttcccaaattcatctaacctaacacccgccactttacagatgaggcagtggagtttcagagaaggaaatgacacatgtaagctctttgggcctgtctggccagaactaaggctaaaacatacaattgctgtttagtgttcataagggctcattccatgagatctgcttgtgcaaatggaagtaaacttccctttctataggtgctgtaatattctataaggctcatgtctattgtccctctcctccaggaagccttccatgatagcctgaatcagttcctttagccatatacaacattcttgactatatctctggtgtggatgtttttcatcctgcctcatggtatagacatccttatctatggagagctctccagagctcatttgcctctgaaagtcctcctcagcctgttagcatgcttatgagggtggcatgaaatgcttgtgtagtgaataggtacaataaagaccaaattaattgagcttagcaggaaccctgcccaaggaaggagaaacaagcccaagcaaatcccagctttgggctggatggaaccagtttagagacaagtgtgagttctggccaagagaagtggagaggaggacagagggctcttcctggaaggcagctttgatgtggtctccatgacaacgaagaagagtccagtaggtctttaagttggtactgggcacttcagtaggatgggacctctctagggatgccagtgcccctctggttctgagtttttttgtttttgtttttgagacagagtttcactcttgttgcccacactggagtgcaaaggtgcaatctcggctcactgcaacctccgcctcccgggttcaagcgattctcctgcctcagcctcccgagcagctgggattacaggtgcccgccaccatacctggctaattttttgtatttttaatacagacggagtttcaccatgttggtcaggctggtctcaaactcctgacctcaggtgatccacttggcttcctaaagtgctgggattacaggcatgagccaccaagcccagcctttttttttttttttttttttttgagagacaggagggtctccctctgtcacccaggttggagtacagtggtgccatcatagcttactataacctcaaactcctggcttcaagctatcctcccacctcagcctcccaagcagctgggactacaggcatgcactatcatgcctggctaatgtgtttgttcatttgtttgtttgtttttgtagagacagggtctcactatgttgcccaggctgcaggttctgagttcttatattcttctggagggcccctggctccctggtgagtaagtgccccctccacattcccaatcctctccagccctggcagaggctgagtggccttcctccctcaggctaagagaagatactgctgctgtcactgacctctgattgaatgtccaggctcaaaacagtgatatttccaaggggaacattagcctcttacaccactggaagtagttggtggggagggtatagaggggctggaatttctgttgggaatcgagtcacaataaccgacatgtacagccatgccctgctgtaagtgcatgacctgcattaactcaggcaacctcataacgatcctgtgaggtaagtattaggattttcattaccattttacaaatgaggaaacagagccctcacaaacacacatctaccccaaggccccccacaacagactgaggaccaccccaaatggactcacaggcatgcagacactttgaactcacagactcacaggcatgcagacacaacaggccagatggaggccacacctgagccagagatacacaggaacactcttggatgcaggacgctcacagtcccctcctggacacacagcttcgtggacacatgcagcgtactccctgacaccctccagcacatctttggtgggggttgcacaggtaaatgcttctttcccggctacgctagtagattgggggctgagctctgacctgtttcccaggagcctaagttataaaatgtaaatgtgaggctttgatatgcaaatgttcatataaaggcaggctgtggcttgctcaggagactggaatatcagagcactgtgatgagtagggagaggaagctatagattcatctggatcagacatcaaggtggctcaggagccatcagagaagcaggctttccccagggcaggtttcaaagaatgagcggcatagggctggatttggttctctgggttgggttagctggggacatcctgtgggtgacctatgccatgtgactgtgagagaaggatggaagtatcctcaaggcctagcttcctcatggtctggaagagctgagttccagagccttaaagggtggaatccagtggggtaaccttgggagacagctctgcaaggtcagatggatgagataaatagggtcaagtaatgtcctatgtccctttagtgtctcccagactggagacactagaggaatgaaccagacagaggggtcaggtggtggggatgaaagatggggagcctgcggtcctccccatgggctggtgggtcaggatgaccaaaacatgccactctttgacttccttttgtcttgtgtcattgtccccttttcacattgcttcctctaaattacagggcttctggatgatgggtacgtggatatgtacccctgaaattaactgcctgcaccaagatgcctggtgcacatttttctttttcttatgtatttattattttaatgttatagaactaagcagattttttttttgtggaggaggtgcagggacaagttgtcactatgtcacccaggctggagtgcagtggaacgatcatgtctcatttgctgcagcctcgacctcttgggctcaagcgattctccctcctcagcctcctgaatagctaggcctacaggtgctcgccaccacgactggctaatttttaaattttttgtagagatggggtcccactatgttgcccaggattgtctcaaactcctaggctcaaatgattttccagccttggccttccaaagtgctggggttattataggcatgacccatcatacccagcctggtttttattttttaatcatagatgtctttacaaatatcttgtcaatatatatcaccttcaacatggttggaaaggcaccacttttggagaacgtgctggggagggaggtaaaacaactacttcccttgttcctctccatcttttactcagcctgagatctctcttgagactccaaagaaatggggctctccttcagcctgctagctgggagtatattgggctaaagaggaagcgcacagataaagctgatgtcttgctcaattcctaggggcaccctgtggaggaggagagcagtctccatataaaagttctaaagatgaggactctttttcccttgggtggtgcaggcattggacgtcctcaagaatcttgggagaaacagaagatcagattgtcccagcctgactcatgaaggatttcttctggcagacagagcagaccgagatgcagttaagagtttgaggtgggaggccgggcacggtggctcacgcctgtaatcgcagcactttgggaggccaaggcgggcggatcacgatgtcaggagatcgagaccatggtgaaaccccgtctctactaaaaataaaaaaactaaaaatggctggacgcagtggctcacgcctgtaatcccagcactttgggaggccgaggcgggtggatcacgaggtcaggagatcgagaccatcctggctaacacggtgaaaccccatctctactaaaatacaaaatattagccgggcgtggtggcaggcacctgtagtcccagctactcgggaggctgaggcagcaaaatggcgtgaacccgggaggcggagcttgcagtgagccgagatcgcgccactgcactccagcctgggcgacagagcgagactttatctccaaaaaaaaaaaaaaaaaaagtttcaggtgggagattctggttccctcctcacccccacttgtgtgtgacagtgtgacattcccaggagtaaaagaatgaacacaatgacctctgtggagccaaatctacaagggattgttttagaattatttattggggaaggagtgttaccttctgaggagctgtaaattgaacttgtcaggatcccagtgagaaacatcttaattttttttctttctttctttctttttttttgagacagtctcactctgtcgcccaggctggagtgcagtggcgtgatctcggctcactgcaagctccgcctcccgggttcacgccattctcctgcctcagcctcccgagtagctgggactacaggcgcctgccaccactcccggctaattttttatatttttagtagagatggggtttcaccttgttagccaggatggtctcgatctcctgacctcgtgatccacccgactcagcttcccaaagtgttgggattacaggcgtgagccaccgctcccggccacatcttaatatttttaaacaaggctaaataaatgcatcgtcctttcttctggaatattgtcccaggaggaaatgttggagcccagtgctggaaggctagcaatcaaggatgccccaaggagagcaagttttatttttagaaggtgctggtgactagcttttcatacttgctatttgcagtagctcagggctctctcccaaatgcaaagcattccttgtcctgttctgtctcctcctgttagatttcaaccctctctgcttctagatgaagcgccccagctcaaggacgggccctctcagaaagctgcaggatataacattttcttttccttttgatttttttctctttctgttgaagagagacaaacggacaaatgtcagcaggctgaaggatgagaatggaattggtgccagttggggaaagtccaggatgctcccctttttaattaagtacggacttgaattatgaggggccacagagcctgctgggtggggctctgctaagggaaggcaatttctctcgttaaagattaaacacggtttattccacttagcctctcctcagccctctgagagtgtctgtatttgctcttgttgtcaggaataatgggcaaccgagtggacgccccagcttgataaggcagggacagagacagttctgtcagcactggcagaagcctggggacttgactcttacctgaatctttttgggagaatggtggtaatgggttggggggagaattcctggttttatttctgagattttaaaaaaattatatttaattattatttttatttttatagagtcagggtcttgctctgttgcccaggttggtcttgaactcctggcctcaagggatcctcctgccttggctttccaaagtgttggaattacaggtgtgagctagcacactggccttgattttttttttttttttttctaagagacagggtctcgctctgtcactcaggctgcagtgcagtggtgcaatctcagtaggcaggtgccaccactcccagctaatttttgtattttttgtttttgtttttgtttttctgagacggagtctcgctctgttgcctaagctggagtacagtggcacgatctctgctaactgcaacctccacctccctggttcaagcgattcccctgcctcagcctcccgagtagctgggattacaggggcacgccaccacgcccggctaagttttttgtatttttagtagagatggggtttcaccatgttggccagactggtcttgaactcctgacctcaggcaatctgcccacctcggcctcccaaagtgctgggattacagacatgagccactgtgcccggccgtaatttttgtattttttgtagagtcaaggttttgccatgttgcccaggctggtctcgaactcccgagctcaggcaatcaagccctgagccagcgtgcccagccttgtttttgtttttatccaaaacacaaactcttctctctcactagtccctgactgcccccaggctgtagggttttcctgaaactcagggagctgctgctgtagatttatttttcttgttgattctcatctatcctactggcgaccccagcccagatttatctggtaatttacaaccacagttgttaattaatgatctggagccacagagcacagagcccaggaaatgatgctccttctgggtaggggcgttgctttcctcttgctttgtggggaccatatgcctgggtggagaagaggatggcagaaagaaaggatgttaggggaacacatgctgagaggacataatacctaaccagagggggaccaggcattctggaccccaacttgagtttccaaaatacagtgtttgggccgggcgcagtggctcacgcctgtaatctcagcactttgggaggcagaggcagatggatcatttgagtatggcaaaaccctgcctctactaaaaatacaaaattagccaggcgtagtggtgcatacctataatcccagctacttgggaggctgaggcaagagaattgcttgaacccaggaggcagaggttgcagtgagccgagatcacatcattgcactccagcctgggcaacaagagcaaaactccgtctcaaaaaaaaaaaaaaaaagtacagtgtttgtatatgcgctttacactttattgttttactaagccttttaagatatcttattacattttcccagcattcctcaaagtaggtatatttagttccattttatagttgagcactctaaagtccagagagtaatttgctttatgtcacccagggagagggaaccaaccaaaccacccgcttcagactccccagctccacggagttccagagatagtgacttctgagggctgagtaaagacaatagcacgttgttctttctagcctgatccccagttctctgggatcctgatcccacctgaccctccccttcttgacatttcctttttatgttcttcccccaccccaccaaaccccactttcctgttaagaaatgcctgttaggatcttgttaattgtgtatcttacaatgtggtttggcattttcttaaattgcatgtcacacatgaatgtcttccacaaagggaaaactgatggaggggggagcattttgctccctagaaattgagaatgtaaagtatatttaattaaaatgataaatctgatattcagttttgtttttactactactaaaactaatctattttatgcacatttgcagaaggctgcagccatcaaatcagagaatattagagctgtgaggcaccttggagatctgtctgggccaaatccttcattgtagagacaaagaaactgagtctcagattggggaagtgccggggatgcgtgagtggctgaggtggagccaggcactgcggcttgttttcctgcgcaccaccttctctctctggcttcaacttctgtgcatcacagggtgggagtcaccaggctccgactcctctctcttttaatgtcttccccctccccatgcaaactcatgctgggaggggggatgggcctctggagctccccttcctcacctccccagggggtactgtttattttctgtcaattctctccctctggcttctctgactcccgtcttttcccaggcaggatccttgtttggcatgatcatttggtgagattttattatattttatgtatttatttttgagatggagtttcactcttgtggcccaggctggagtgcagtggtgcaatctcggctcactgcaacctccacctcccaggttcaagtgattctccttcctcagcctcccgagtagctgggattacaggcatgagccactacactgggctaatttttgtatttttagtagagtcagggtttcaccatgttggtcagactggtcttgaactcctgacctcaggtgatccacccgcctcagcttcccaaagtgctggaattacaggtgtgagccaccacgcccggcctggtgagattttaaatggcatttggttctctgttttcccctctgtccttctacaaggtagtaaccagatctctgcttttattgtcccagctgtgcctgcagagttgaaaacaagctattgaatccacattttaggttgcatttgcttaaaacaacattgtgcatttgcttaagacaacattgtgcatgttgtaaaacatttatttatttgaatagataagatatccacatagcggccaggcgcggtggctcacgcctgtaatcccagcactttgggaggtcgaggcgggcggatcacgaggtcaggagattgagaccatcctggctaacacggtgaaaccccgtctctaccaaaaatacaaaaaaattagctgggcatggtggcgcgcgcctgtagtcccagctactcgggaggctgaggtaagagaatggcacgaaccaggaggaggagcttgcagtgagctgagatcacaccactgcactccagcctgggcaacagagtgactccgtctcaaaaaaaaaaaaaaaaaaaaaaaaaaaaacccacatggcacaaaattcaaaactaatgtagtactcgccagtgaaatttttaaatctctcctctctctgtcctctagcagctcagtttgccttcctggaggcagccattatgttcagtttctggtgtatccttggtgagacgatccatacatgtatatccaaaccaattcatacctcacatacatacattaattaattccttcccctttggttacaaaacttctcctgcatgatgttgtcttggggaagtatcaacaactgcttagtcatggtttggggcgtgccaggttagaggcaatgacctttctgatttacgaggtggtgctggctgcactcatttgggttctgtggggaggtggctttgagttcctcggggcccagtctgcagtggctattgggagaaaaggccccaccttcctgggcagagaagtggagcttccacttaaagaggcagaaggaggctgtcagaagagggaagggtgagtgtgtgtctgtgtgcatgcacacacacacgcgtgcaggttatagtaatcactgtttcacatcttatttttaagaagtcagaaggttgtggtaagaagtgagaatgaggagtcccctttaaggtggtctaaggttgtgcccaagacagttggcttgttccttgggaaatgtctttcagggcctgaggagctggataaaatggagggaatgacctaatccatttggtccaattgatttttttttttttttttgagacagaaactcactctgttgcccaggctggagttcagtggcgggatctcagctcattacaacctctgcctcctgggttcaagtgattctcctgcctcaacctcccaagtagctgggattacaggcacacaccaccaggcctagttaattttggtatttttagtagagaagggatttcaccatgttggccaggctggtctcgaacttctgacctcaagtgatccgcctgcctcggccttccaaagtgctgggattacaggcgtgagccaccacgcccgacctcatttggtccaatttctatcaggaatcttctttgtcatcatctcccctaactccaacttcaatacagtctcaacaagcatttacagaaatacactctgcaaaaaaacatgtgctaggctcagaaaaatgtccagaggctcagaaatgaggaaggcccttgcccctgcccaaggagcccgccatctcgtgatggcattataggtgtgtggggctataagtcttcaatgtttttgtgcaaaagtcaggggctgcctttcaggaggaaacagtgaagggtgacggcttcggtcctggaattcctattctttttttcttttttttttttttgaggtgaagtctcactctattgccgggcaggagtgcagtggcgcaatctcggctcactgcaacctctgcctcctgggttcaagtgattctcctgcctcagcctcccgagtagctgggactacaggcgcccgccaccacacccggctaatttttgtatttttagtagagacggggtttcaccgtgttggccaggatggtctctagctcttgacctcatgatatacccaccttggcctcccaaagtgttgggattacaggcatgagccactgcgcccggccggaattcctgttcttttaagcccatgtctaatgccatttcctccatgaagtctctcctggtgcatttcttctcccagggaaccagcgctctccttcagctttgtcaatgtaagttgtgaagaaagtatttgttggtcgggcatggtggctcatgcctgtaatcccagcactttgggaggccaaggcaggaggatcactaggtcaggagatagagaccatcctggctaacacagtgaaaccctgtctctactaaaaaaaaaatacaaaaaattagccaggcgtggtggcagatgcctgtagtcccagctacttgggaggctgaggcaggagaatgaagtgaacccgggaggcggagcttgcagtgagccgagatcgcaccactgcactccagcctgggtgacagagcgagactctgtctcaaaaaaaaaaaaaaaaaaaaaaaaaaaagaaagtatttgttcattggaaaagataaggtctctttcatgatgctcatcttccccaaccttgtgttactatgaaatcctctgtggatctggcttgagtctccccactgtggatctggcttgagtctccccactggattagaagttcctagagagcaggctgggtgcctcacttctgtgctccctgtggcacccaagcctgcccctggaacagtcagggctttgcaaactccctgctgaagctgaatcagagggagtagctttgttcagcctctggaactgagttcacagccaaggagtgctctcaggagagatatggaaggacatgtatggcctgtaagctacaaagtgctttttttcaatgactgaaaaaacattttttaaacacaatattttttgacatgtgaatatatgagaaattcatttttttttctttttggagtttcactctgtcacccaggctggagtgcattggcgtgatctcagctcactacaacctctgcctcccgggttcaagcgattcttatgcctcagtctcctgagaagctgggactacaggtgcatgccaccacgcctggctaattttttgtatttttagtagagatggggttttgccacattacccaggctggtctccaactcgtgttcaggcaatccgcctgccttggcttcccaaagtgctaggatcacaggaatgagccactgctcctggccgacaaattcaaattttagtgtgcagagatagttttattaggacacagccatgcttacttactattttaggttgctttgtgttacaacaggacagtttaatatttgcaagagccacagtatggcttgaaaagcctaaaatatttactctctggccctgaacagaaaaagttcgcaggcagagaacctaattcacaaatactaggaatccacgttgaaggttgggcagcccaagggaggtggtcaagtgtctctgggcaaggcaggggcaagggcagcccagcaggaagcaggaagggaacttgcctaaggttgccctgctgggaaggggtagagctagcctgtgaacccaggcttgtttgctttcagaagccaaatacctgtccacagccacagaagaggcctggactttggtatttaaaggagagatagagaccctcctcactgagaggatcagagaagacttcttggaggaggtggcattggagctagcattgaggtgggtaggatttgggtgtggggctagagggaggatattccgggcttagggaatatcaggaccaagggcaggagtctgggaagcacaaggttaaattaggggagggggaagactctagggtgcggtggaagggagttttgggaagtggggagatagtccttggaaacccttgagatatttgccttggaattttctctttggaatcttggctctgtggccccaggcctgatgtctttgccggctggccacgaagctgagagtaattccaggctagcgtgagaggccctggtaggtcagagtgtctggttgcctaagcttttgtacatcagtggccttggacacgttttcctggatgcaggcctggtctcggtggcaaggctttccctgagtggagcctgggctatctccctggtagagattccaagacctgcctgtgaattttccatggggccatcacacccctggaactgaggaaagaaaaagggggaagtggttttcctttgcaagcatgaagctggtggcttctccttagaggtcctagctggaccccatcctcccttctgggatggagtggaggaaattttacctttgggaacctgggaggccaaagttctggagatttagcagctgacatccctaaaggataagccttaggcctcctggcaactacatcagtgcttaataaatgtttgtgagtgaaggaatgagtgagtgggtgctgggggaaggggtttgtccacaggggtgcaaaacaggcctctacctgccagacacttcctgtttagtcggggaggtgggtgggaggtggcactgtgctgttataataataacatttttcataactgaggtttaagcactaaaggcaacccaggataggtacatatcaacaggagggcagaggaagccactcctggaggtgttcccgttctagcccacagaggctctgagttcctgccctgcttagtgctggcttgtcctggaagttccatcattctaggtgctagaccctcacttggtctctgctgctctctactgaggatggagacttcagaaccatgacctcgtgcagagggatcactggtatatgtgggtctcctgggggtagaggaagggggcatttgtgaccttgggtcctgctggcccccctctgggagttacaaagcttactttctctgctcagacagggctgggggagtgagttgttctttttgcccaacccaatttcagcaactgcatgtgagggagaaccacggcagctttgagtcacactcctagtgccctgcttgtcccatggtaggagggtgtctgctcatgcctccaagtcactcacttctccagggctctgtagcccacccctcttcgctggtcccctcaggatctcaaactctggagacctcaagtcattcagctttgaccctgctctattccctctcccagggcaggccgctgctacagggaagggagcccaacagaatcgtctctgtgcagctttgcaccatggagtctcacccagccctctatattattgtaccaaaacctggaggctcagaaaggttaagtgacttgcctgactcacacagccaagaatggcagttggagcttgaatgcctgtgaacttctgtctagtgtatcagtagattcaatggactgaaaacaggagacctgaggtctgacccagacacccatgtccagaggcgcagggcaaggaggcagaggctcagttgaggaatcctagttcctgataacagagatgacagctaaagtcagagaaaggaagttaagaaagaaagggattgctggtggtgaagctctggcttctctatgcctagtggctgttgattcaagatgccctctgtggccgaacctttggggtcaggtgaggaggaggatagggccttaatttagacagaacccttgggcccctgccttccagtggaaataccagggtaatggaaactgcaaataggtgttatacctggggtttcaactagggttccaaacaggaatattcctggggctggggtagagggaggaggtagttagtaattatttccattttattcatttattgagcaattgctacatgccaggcactgtgttaggagatgagaatacagggtcaacgacagtcaagaacaacagcaaatctttcatcgttcatcatgtgccaggctaaatgttttgcatgtgctactcatttattccacatcatatatgtgtacagcgtagagaagtttctttctaacttctctgttagaaagtttctaagtgtctgggcgcagtggctcacgcctgtaatcccagcactttgggaggccgaggtgggtgaataaactgaggtcaggagttcgagaccatcctggccaacatggagaaaccctgtctctactaaaaatacaaaattcgccaggcgtggtggcgcatgcttatagtcccagctactcgggaggctgaggcagaagaatcgcttgaacctgggaggcggaggttgtggtgagctgagatggcaccattgcacttcagcctgggcaacaagagcgaaactccttctcaaaaaaaaaaaaaaaaaaaagaaagaaaagaaagtttcccaaagtcacagagctagtgaatagcaaggggagtcaatgagtaagctcaggccagcaaccctgcaaatcagatctctctccagcagaggtgtgctctgagtgtcccagggatttgagagaggggctctgcttggggaagtggggaggcagcatttgagccagtcctcatgggatgaatgaaatttcttcctaggagaggggagaaggttccaggtttaaagaagcagcatttgccaaggtgtaggagccagaaaggaaatcctaggggagagacaaatttgggggtagtcctcaaaattcctaccctcaggctagggagtgtgagcattttgaagaccttgtttaggagcttgtattatatcctatagatcatgggagtcactggggtcgggggcagggtggcggagcatgggtaggttaaagcaattctgactgaatcagaccctaggcaagaggaaggaggtcactgccttggaatcttcaagagtcgctcatccctgatcctgtcccccttttgccacataagatgtgatgccatcactcaactcatcattcaccaacaagctatggggcctggaacctttctatgcctcagtttcctcatctgtaaaacggcaatactagtagtacctgcctcagagacctgggtgtgcaggtaaattgagatgctctagggaagctcaggctttcagtaagggatcaataaaggctagttcctgttatcagatgttacctccccaccctgtcccgggtccagtcagcatctcgaagtcctgactctcaggaatgcccccactccgcctaccagtctgatctaaatccctctgctgcagatggagcccagcttccctgacagcctttcaggacgggaagctccatgtttagtgttccccaccctcgtccagcctctctaatctcagctcttccctttcccctcccctgtgattatcataaaccctctcgagttaggcaggcttggctgggccccatgcccctttgaagtcccaagccaggttcccagcctcacacactgacttctgagaaagctgcttcccatcaaatcctgccgccaaaaagactctcctcttaggtattcctgccaactccgttttataatctccgtgccggggagggaggacagttcaggcactttgtctgcaggaaggaagcaattaaattattagcactttgagaaattaaacgacataacttacggcggaataagtttagccaaaaaaaaaaaaaaaccttgtaatgtgagaaaacaattaaaaagaattatataaggttgggctcgctcctttattgcaatagagttagcagttcattgattatcgtcctgttataatgcagcaggatggtgcgggctgctgcggaggcagcgacattcaggaagcaaagcgcttagttgggtcctgcaagaagaagaggtgggggagctgaaaggttttcctggagggcaagggggaggggagagtggggtcagaggaggatcaccaaagcagcagctcttcttcccttctccctgctcctgccttggtagacatggaaaagagctagtcaatttcagcagtttgtcagttgctggggcagtcaattccctgtgcccaaaagattcttttcctaggtattcatccagtgaaatgttcacacggctccataaggagatgtggatgaggatgatcagagcagcctcataggaggcaccctgggtgtccctcactgggagagtggaaaggtcaagtgggtggaagcaccaaggggcgccaggtagcagcaagaagcactgacgcctgtacacagagccccgcgatagatctcaaaaacgtagtgctccgcaacagcaaaaaatacaaattctctctacccgcaacgacataggggagtctcccagacaagttgagcaaaagaagcaagacatgaaagacaggtacgattccatgcagaggaagttcaagaaaaaattcaatgaatgggtggagatgggagctggaagagtgggtacctcaggcagggaagggggcagtttattgactgtgaagggacacaagggaaacttggctggggtactggaaatgttctatattttgatctcggtgatgattacacagatgtatatgtaggctaaaaatcgagtttcatatttcagatcagtgcacattactcactttaccgtatatatgttatacctcaacaggaaaggaaagagcaaacaaatgttgtagaggaaaaaaattgtaggaaacaaaatatataacacaatgctatttatgtaaataaaccccatgcctacgaaataactacccatcctgaaagaactcagcaaacagattgggtgcagtggctcatgcctataatcccagcactttgggatgctgaggtggggtgatcgcttgagcccaggagttcaagaccagcctggacaacacagtgagaccccatctctacaaaaaaatgaaaaaaattacagtggcatgtccttgtagtcccagcaagttaggaggctgaggtgagaggattgcttgagcccatgaggtcaaggctgcagtgaactctgatctcaccagttcactccagcctgggtgacagagaagaccctgtctcaaaaaaaaaaaaaaaaaaaaagggaatgtatgaatgaatgaaaccaagagcagggcactacacagaccagttatgacaacaggccatgaacggagagtatggtagactcaaccctctccttccgaagtagaagcttgtagaaaaagtgctaattaatcatatcaggaggtctttgggctgggtgtggtatgtgtagggtgttggggcattttgatctggggagtgagtgtagattcagtcactgatgcctaccaggaggaaagggaggtacagatctagcatttgtaaacttctctgcagtttgcaaagcaatgccatgtctaccacctcagagagcctcacatagggtgtttcctggagggagtgaactggagccagcccgcctgctaccaccccaagatgggtttccctggcaggtgatctaacctctctgcatctgggccatggggatgataaaaagaatgtctagagtgagaggggagttagaacacagtttagagaaggggtcagccacctttttcttctcttttcttttttgagacagagtttcgctcctgtcacccaggctggagtccaatggtgcgatcttggctcactgcaacctccgcctcctgggttcaagtgattctcctgcctcagccttcggagtagctgggattacaggtgcccgccactgcgcccagctaatttttgtacttttagtggagatagggtttcactatgttggccaggctggtcttgaactcctaacctcaggtgatccacccgccttagcctcctaaagtgctgggattacaggcacgacccactgtgcccggcccagccacctttttctatagaaggtcaggtggtaaatattttagcctttgagggccataaggtctctgtcatacctactctggaagcagccatagatgtaaatgaatgagcatgactgtgttccaacaaaattttatttatggacacggacatttgaatttcatgtaattttcatatgtcacaaagtattattcctttttttaacttttaggttcaggggtacatgtgcaggtttgttatataggtaaacttgtgtcacggggttttgttgtacagattatttcatcacctaggtactaagcccagtacccaatatttgtttatttatttatttttttagaaatagggtcagccgggtatggtggctcacgtctgtaatccgaacactttgggaggccaaggtgggcagatcacttgaggtaaggagtttgagaccagcctggccaacatggtgaaaatccatctctactgaaaatacaaaaattagccaggtgtggtggcacaggcctatagtgtcagttacttgggaggctgagggaggagaatagcttgaacccgggaggcagaggttgcggtgagctgagatcgcaccactgcactccagcctgggtgacagagcgagactccgtctcaaagaaaaaaaaaagagagagacagggcctcactctgttgcccagactagagcacagtggcaccatcatgctcactgctggctggaactcttgggctcaagtgatcctcctgcctcagcttcccaagtagctagggctacaggcacatgccatcacacctggataattttttaattttttgttgagacagaggtcttgctacattgcccaggctggtctcgactcctagcctcaagggattctcccacctaggcttcctaaagtgctgggattacaggttgagccaccacgcccagctgtgaagtattattcttttgattttttttttcaaaccttttaaaaatgtaagaatgattctcaacttgcaggctgtacacaaacaggtaggaggccataactgctgacccctggtctagaggataaatgagttggagcagtccttggcacatagcaagtgctcaagaaacctcagttattatcattctcacccctgttgtacagatgaggggcaaagtgacttatccaggtttaccagggagttcacggcagaactgggcctctcatctggatctcctgagtctcaatccactttgaacaaatgctcaagaaggaaagagtctaagttgtacatgacatccctttttccagggcccacatcttgcagcacaaagtctggcttctagagagactagagctcctctatgctcttgtttcctgcagcagcagtgtgctgaatttcctgatgtggatgtcattatgggtcatccaagtgcacctctagttacatttatataaagttcaaatccaggcaaagctaatctgtgctattattattagaagccaggagagtgggcggggcacggtggctcatgcctataatcccagcattttgggagactgaggcaggcagatcacctgaggtcaggagttcaagaccagcctggcctacatggtgagaccctgtctctacaaaagtacaaaaattagctgagcttgatggtgggtgcctgtaatcccagctactcgggaggctgaggcaggagaatcgcttgaacctggaaggcagaggttgcagccagccgagatcgcgccattgcactccaccctgggcaacagagcaatactccatctcaaaaataaataaataaataaagaagccaggagagtggttacctctggaaggagacacatggaggcttctggggttgaggaaacgttctgtctcttgatctgggaatggacttcgtgaaaaggcatcagacctacactgggtacatttctaggcagatgttctaatccaataaaatgtacatagaagtagccccagccgggcgcagtggctcatgcctgtaatcccagcactttgggaggccgaggcgggtggatcacaaggtcaggagatcgagaccatcctggctaacatggtgaaactccgtctctactaaaaatacacacacatacacactcacaaaaattagccgggcatggtggcgcgcctgtagtcccagctactcgggaggctgaggcaggagaatggcgtgaactcgggaggcagagcttgcagtgagccgagattgagccaccgcactccagcctgggcaacagtgcagcactccatctcaaaaaaaaaaaaaaaaaaaagaaaaaagaaaaagaaatagccctaaagccatcttggtgaagcagtaaacttttagtgttcacttttagttttagggacaggaagcagaactgatgtcatccaagcactattgctgtgctgagcagcaaaggacatcacccacaagccttgcaggtgggacagaaggtcctctcatccatacacatctggcaccttgacatagaaagtgccagttttgccgggcgcggtggctcacgcttgtaatcccagcactttgggaggccgaggcgggcggatcacaaggtcaggagttcaagatcagcctgaccaacatgatgaaaccccgtctctactaaaaatacaaaaattagccaagcgtggtgatgtgcgcctgtgatcccagctactcaggaggctgaggcaggagaatcgcttgaaccagggaggcggaggttgcagtgagccaagattgcgctactgcactccagcctgggcgacagagtgagactccgtctcaaaaaaaaaaaaaaaagaaagtgctagttttggttggccgggtgcagtggctcatgcttgtaatcccagcactttgggaggccgagatgggcggatcacttgaggtcaggagctaaagaccaacctgtccaacatggtgaaaccctgtctctactaaaaatatttaaaaattagctgagcatagtggtgcacgcctgtagtcccagctacctgggaggctgaggcaggaaaatcgcttgcaccccggagatggaagttgcagtgagccgagattgcaccactgcactccagcctgggcgacagagcaagactctgtctcaaaaaaaaaaaaaaaaaaaaagtttgcttccttggagcgcagaaaatgtgtgagtgtatgtgtgtgacagtgtatatgtgtggtgtgtgtgtgagatgtttgtgtggtgtttatgtgtgagtatgcatgtgtgagatgtgtgtgcatgtgtgagcaactgtgattgagtgtagggtgtattaatggtgtgtttgtgggtgggaagtgtgtgtgagtgaacgtgttaattttgtgtatgcatgagtggatgtatttgtgaggatatgtgtggtgtgagctgtgtgtatgtacaagtggttatgattgtgtttgtgagagtgaggtgtatgagtatgtgtcagtatatgtatgggttgtatacgagatgtgtgtgtagatatgatgggtgtgtgtgtacctgtgcatgggtatgattgtgtatatgtgtgtatatgtatgatgtgtgagatgtgtgtaagtgggtataagtgtgtgtgtgagtctgtgagaaccaccctaaaacagagcccagaaactttcctctccctttggagttgcgatttgggactttctgggggcctgtgtgggcgcacgtgtgtagtgtgtggtacagcagaggtgctgggactcatttctctggctcgagtgcctggcaaacacttgctgctgctcctccagtgagcagcttttatgtgtttttgtaatgcatgtcccttgattgctgcagatttatgcagagaaaacgggttctggtaacgggccgacccttttagctgttgctcatttgggtggatctcaggccctctatttgtttctggagggtttgctgcaattctgtctgaaatgtgtcaagcttcctgcctacgagaagacatttattttattcagatgatttaattctctcattcagagggaacaaaacacacattttgcattacaggggcctgaaggagagagtgagaaagacagagggatgcagaaggttgaaatgtggtgatttcagctggagctgggagaagacttctgtccaagggaacacacttcacaactgggcgtagttatggtggcccaaagaataagggcctgtctttgggacttttctgtgaaaaacaactggtctcgttggtgagatttgagaaagaacattccctccttccaccctctgtcacccagcttggcccttctggagatcgggcttcccccagtctcagtctccagcagcagagcctgcccagtgcgatctcctggcccacctctgtgggctcctctctctccctcccttgaacttgactgttttccttccaagaacacaccacacctctgcatgtttctctctattgcttggaacatcctccttcactcttttctttctttctttctttctttctttctttctctttttttttttttctgagacagagtctcacactgtcacccaggctggaatgaaatggtgcaatctcaactcactgcaacctctacgtcccaggttcaagcgatatcctgcctcggcctcctgagtagctgggcttacaggcaccaaccaccacacccggctaatttttatatttttagtagaaacagggtttcgccatgctggccaggctggtctcgaacccctgacctcaagtgatccgcccacctcggcctcccaaagtgctgagattataggcatgagtcaccacacccagccctccttcactcttggcctacttgttgaacccttatttgtccttgttatgtcctcagttcatactttgctttttatgatgtgctttcccatttcctctcccttgcaaatatctttttttttttttttttttttttgagacagagtcttgctctgccgcccaggttggagtacagtggcatgatgtcagctcactgcagcctctgcctccccaattcaagtgattcttgtgcctcaaccacccaaatagctggaattatagttgtgtgccaccacgcctggctaatttttgtatttttagtagagatggggttttgccatgttggccaggctggtgtcaaactcctggcctcaagtgatccacctgcctcagcctccctaagtgctggcattacaggcatgagtcaccacgcccagccatcccttgcaaatatcttgactgtgatgctcaccacactgagctataattctttgcccatgtgtttttctcccacattcagccatcagtttctcttgggtacaggttgtgtcttattcatctctgaatcatcagatcctagtgcagtccttgcctcgcaggagatactggcctagaagcttgctgaatgaatgaatgaatgaatgagcacacaatcaggagaatggacaggatgaactgcacagacacccacatagttcctcaccatcccacctcctatgccagagtcattacacaaatattcactcctgcaaacgcatacttctcacccataactcatggtggctgaactgaattctaacaattgattcttgttctgcacacattggcattttgctttcagaagagctctggtagctgtagcagtcctttaattcatttatttatttatttttattattttatatatattttttgagacagagttttgctcttgtcacccaggctggaatgcaatggtgcaatcttggctcacagcaacctctgccttccgggttcaagtgattctcccacctcagcctcctgagtagctgagattacaggtgcccaccaccatgcccgactaacttttgtattttttttttcttttgagacagagtctcgctctgtcacccaggctggagtgcagtggcgcgatctcggctcactgcaacctccacctcccgggttcacgccattctcctgcctcagcctcctgagtagctgggactacaggcgcccgccaccacgcccagctatttttttttttttttgtatttttagcagagacagggtttcaccatgttagccaggatggtctcgatctcctgacctcgtgatctgcccacctcagcctcccaaagtgctgggattacaggcgtgagccaccatgccgggcctaatttttgtatttttagtagagacagggttttgccatgttagccaggctggtctcgaattcctgacctcaggtgatctgcccgccttggcctcccgaagtgctgggaatacaggcatgagccactacaaccagccttatttttatttttaattattattattattattattattatttttgagacagagtttcactctctcacccaggctggagtgcagtggtgcaatctcagctcactgcaagctccgcctcccgggttcaccccattctcctgcctcagcctcccaagtagctgggactacaggcacccgccaccacgcccggctattttttttttttttttttgtatttttagtagagatggggcttcaccgtgttagccaggatggtctcgatctcctgacctcgtgatctgtccgcctcggcctcccaaagtgctgagattacaggcgtgaaccaccaaacctggccctatttttatttttttgagacagagtcttgctctgtcgcccaggctggagtgcactggcgcactgcaacctccgccttccaggttcaagcgattctcctgcctcagcctcccacatagctgggattacaggcgtcagccaccacacccagctaatttttgcatttttagtagagacagggtttcatcacattggccacactggtttcgaactcctgagctcaggtgatccacccaccttggcctcccaaagtgctgggatctgcacccagcctaatttttatatttttagtagagatggggttacaccttgttggccaggctagtctcgaacccctgatctcaagtgatccacctgcctcagcctccccaagtaagccaccgtgcctggcacagctgtccttttagacaaggtttacctgagcagcacaggatgagggagaaaagtgggactggaggggcattccaatgttgaaccaagaccaagttggggggctttgagctttggggtcctggtcggaaatgggctactctgaatgtggtaatggactggggcaggagggcctgtggtgaaaagagatcagtgactcagagtagagaaggatcaaaggctgcctacagatgctatctctatatagatgagtgttcctgcaggcaaccagccactcctctgctgaaccctcttaggctctagtgagaccaaatacaagtatctggcacattgaatgaatgaatgaatgaatgaatgaatgctgtttgaccttgagcaaactattttacatttctgggactcactttttctcacctgtaagttgtggggggttgaactagacacctccagggtttccactgccacgtctcccatctcccctttgtcaattagtggtacatgcactgcacatgcatcaatatcaaagtatatgatataatcatatacttacatcaaatatgaattttgccgtctgggcgtggtggttcatgcctataatcctagcactttgggaagcccaggtgggcggatcacttgaggtcaggagttcgagaccagcctggccaacatggtgaaaaccatctatactaaaaaaatacaaaaattagccaggcatggtgccacacgcctataatctcagctactctggaggctgaggcaggagaatcacttgaacctgggaggcggaggttgcagcgagacaagatcacaccactgcactccagcctgggcagcagagtgagactccatctcaaaaaaaggaaaggattttgcctaattcctcttggtagccccttgaactcttagtagaggaggatggagactctggagtcaaacaacccttggtttaaatttttgagtttgccattagctaactatgtgatttaggacaggtttcttctctttgcttctgggctgtcatccacgaagtaggaataataatcattgtgtttatcactcagttacaagcatcaagtgagataatatgttcaaaagagttttgaaacctgcaaacgtcactaaggtgttatttatgattatcccacataggaggtgatcaggaaaggctcactaaatgaatgggtgactttctggacttgcttctatttttactccagctctgtgaacgtcaattctttagagtttttttttttttttaaatggactttaacctaactctgcagagaccttgaggcaaggcagccaggagttccccatcacttcataaagctcaccacctaagtgctccagctttgtccctctcataagtcaacagggtgggtgggggctgggagggggaacaaaggagctgttagcaggtaggagcaaatcagcccatctctgtgcaagtcaccaccaataaaacttaatcaatgcaaccccttttaagttggttggatcagtgacccagaaaatagctcccctgcagaaaaggaaatgatagtcaataaactgagacgtcaatgggaaaaatctattaaagagagtgagatatcaggagacctctggtgttaacggagaccctttggaatggagccatggatccaagagcaagtttttaaccctctcgaggcccagagtagcctctgccccaactcagtcggcagcagagcctgcagcttctgcagcttcgctgggcccctgggtctccccacaccatattgaggagtacctgctgtctaatttctttgtgccacttgcctgttcaaactggtgctttggggtgcacgtgttccctcctaggtggtcagcaggtggggttggcctgaggctctgtttggggtgctgcctagagatgacacctctctggcccacagagaaatgagctggaggtctctgcctcagttccctccgagttataacacctgctctgacctgggtgttgggagctagaggtcaatgccttgcccttgaccaggcctcctgacaccgtcctgccagttagcaggagccactcctctagagtttaaaaggaagcgaaacctgtccccaagaaaccggctgaagataaggtaaagcgcatggcacaatagcgttcgcgtggcacagtggcgttcgcttggcctgcacactgcttcagcgactcttccagctcgctgtcatcaagcagggcagggaacgagggacactgtggtgggctggtgggcttcagggtaaagctatgttaaacagaaaaacttgggagcacattggtaggagagcagctcttgtgatagtgtgtgctggttctgggaatgctgcacagcctgtgccatgcctgttgtcaccagcagcaccaggctgcacatactgtgtctgtctgtgtctgtgtctgtgtgtgtagctgctgagtttgtctcacagagccaaggctgctgctaaagaacgtcaccaacagacagtgacaatgtcttcagtaaaggacatttggacatgctgatgcattgcaaataaatgtgaaaatgttagagtaagtttaaaagggggcatgtttacatggaattggggtgagcttgacagggcctggcttgggcagagggttgcagggagcaagacttgtgcctttcctcctttcatttgcttttggacacaaccttttgctggtgaactctctgtccagtgactacatgcaccctttattattattattgctattgtttaatctttgagttttacagtctctctttagaaacgggagtcacagagccacggtatttatgtcatctagatcagccgactgtaggggagatattgacaatttcctggtctatttgggacagttccagggcccacaggtgggtgactgtgcttcaagaagccacaaagctcacacgaatcagctaagattagcttagctaagattagctaagctaagattagttgatcacagatacatatccccagatagaggtaaagggcatcctcacagctccccccttccttctctcctgctgctgcccgtgttgcttatgggaagtcagctgttatggggataggagtggttaaatgcagtgggggttgtgaaagatgttctaatatgtttgtgggggttgcttataagcaattttatgaatatataatttttggaactgggctggtcctgttcctataacacaggaacgcaccaggagaatcacttttcctaacagtatgagaaccagatgggtctctgtcttcattcaccccctcagattggccatggactctgggaggttggtggggggtgtttagtggtaaaagaataaattgacaaatatgccccagacacaggagtcgagtccctggttcctctgagtcatgagtttacgccttttttagggtctggtggtttttctttggcatttcagggagcattcagaaagcactgatgtgccctaagtcagcatggtgagcccagaggctagggtgaggcttcctccactcccatcccaggagtagggcaggggtgttccttagagacctcgctctctcatccccttcaactcagtgaccccctcaactgcagaggcctgtgaagatggagcctgatgtagctgaggataatgaatactcattcctgggcaggccgcctgagctctagagttaggggagctttctcggagtttcacggtcatctcgttctagctgtgtgaaactgggcatcactttacctctccgagcctcagtctcctcatctgtaaaatgagggccgataatatctccctcacagtgttgcttttaggatcaaacaagacaaggtatgtataacatatttatcgtggtcactggcacaaaaaaggagcttggaaatggtaggttttttattatttatttatttatttatttatttatttatttatttattgagacagagtctcactctgtcacccaggctagagtgcagtggcatgatctcggctaactgcaacctccacctgctgggttcaagcaattcatttgcctcagcctcccaagtagctgagactacaggcatgtgccaccatgccctgctaatttttgcagggtttcaccatattggccaggctggtctacaaactcctgaccttgtgatctgctcgcctccgcctcccaaagtgctaggattacaggagtgagccacagcgctgggctggaaatggtagttcttttactcttccaagacagggtcttatttgcaaaaacgagcatcctatgttacaagctgtgagtgagggattttttgaaacagagtcgctctgctgataggaatgcgtgtccgttgtagaacggggtggggtgggcagggggcgtgtgtcccttgggctttgaccacagggtgccaagtccagaggtctgtcgggagttgtgtgctgctgccacaaggtggcagtgttggcaaacaaaccacatcctccactgctacgaggcctagatgggaagaattttacctccagtttaaattctttttagaaagggaatacttaattccatgattctacaccttgggaatggaggcccacagaggggaagagctttgcccaatatcacagaatgagttggtggcagagctgtgccctttatctgggactcctgacagtttattcatgaaacacgcatttgccatactgctcttcccttagcttcattcacatccttggcttgggtttggggggtagtgggaattacttgggggctccagagtccttggttcagtctttgcatctctgttttcagtggagctagtgggacccaaaaaggtttacatgattacctgagataaattgtgggatcccagagtccccaagatcttgactctatatccacacctcacttaacggtttatcagtatcctagtgacagaggcgatgagaaacccatgatctcccctccaccaccccctccccagcaatagcttgttattcccttaagtccagggtgaatgggtggggtgggctgggctggtttgtctgcttagtcccaggattaggaggaccccgtctggctgtgtttgttaaggaggcagcctgaagtgcatttggcttctgctacatgtcaggaactaggtgagtgctaatctcctgaccctcgttgagtaactgggagaagattacacccaactcccagctgaggacgttgaggctcagaggggtgaagtagctcatccaggacttcctgatgctgagcctcttctcttaaggagttggcccaatagggtgaggagggatgagatggcccacctttatgatctgtgtcctcagaccagcttctttgtcctgccacagaaagccccctatgaatagaaccttctttgcacaaactccttgcctcctgccacttcaccccctccccattgcagcttcccacgagttcctttccagagccgtcgcttgctgaatgggttgctagtggaaatgtggttttcaaatttgggaaatctccattaagtccttttatttaaggaggatgtcattatcgcgcctccctgaggactattacggttctattaggcaaggccgcagacttcctaggtactgtctggggtctgattcctgggcaggaaaatgcaagacaggaagaaggggaggggggttcagagagagaacagaggctggggaggggaagcagaaagaagaaaggaggagaaagaatgaaagagaatgcgggagggaaagagaaaggagtgaggaagtgacagagggagaggcaaagagcccctcaccccccaggcagaggagagagggcagaggagaccctgggccacttggccatccgacagtctagaggatttacaatgaaactggacgcgagctgcccggaactggcttctctctttcattagagacaggggatcctggggagttcttcatgccttccggctgccagcccaccttggggcctccacgttcagatttgggagaggcctcagtgagggctgggagggaggaagaggatgcccagggagggtggttctggaaactaggtctgagctcagttggcccagaagggtgttggcctgcctgaccactctggtgaacataatgttttcccattctctgctgccccctctagaaggcaagctccagaaaagcagaccttctctctgttctgtgttctctctgctcccagtcactagaacagtgccagacgcatagtaggtgttccataagtgtttgtggagagaatagtaaataatagaagtggaaacaattccactgcttccccatcctctcccttgctgcattcagagcaaaggtggatggacctcctctctgttctcagtaaaggcttgtgaccctttacacacacacacacacacacacacacacccgggcaggagggtcaggaatcgcatggcaagcagctgacactggcttggccaaatgagaaaggaaaatatatatgcccctcctgggaccttcttgttagggggttaccatctgcgggctgcctgctggaagtgctttagcctctgggcaggaaggctgatgttctgcgacaaacatcctggctgggaaatcccctggcccgtaggtccctagggcctgggcagcctccttccacgccatcctgccctcttcagaccttcccctggctcctgggcctgaagccgggccacctctctctgcctctgaggggctcccccgtgagagctagcccagtgcccctggggcgtcccctccctcggagctcctgtgctgaagtgattaatgaggcagggacaaagcctttcttaccagctgtgtcaacatgccccttaccccgcggccctgctagctacaggtatggggaagcagccccccacccccacaccactgccctaggcaattgcctcctccaagcctgtttgccccttacctgggctctcttcagggtcccaggcctcccactgggccatcagtgtctgatggtgatgatgatgatgatgattttatgatgcttacagcacttgatgtttgctgagagcatgactctcctttttctcagctcctctttccagctgcctgagccaggggatcaggtgtggctgtctttgggtgacggggagcaactgggctacagttgctgggactgatactgcctcctctgtgaagccttccctgatcacctctagcaggctttgtgtctatccctctcctcccgtccctttgtgtgtggagctcgtctgttcccctcactgcttccttaagggaggagattccttctctgggtatgcatctttgtacctcatccctctttccccacacctccattctcaagacagcctagcacggtgcttggcgcgtgctatgtgctatgataaatacttatggaatgaaccaatgacttgtagatctggaatgatctggaattccatggcgtaggtctgtgttgtctgtggttctgcagactgattaccttgtgtttgatctgtctcagacctgcccaggaccacacatcctgcctctggccccagctggtctttgtggggtttctagtggttgctgcccaaggaactctgttggggaggacggtgaccttgtgctggggaggacgatgaccttgtgctggggagtggtgagggtgcggtggggattcagaaagctggaagcagccacatgcttttttttttttttttaatgaacattacattttagaataatgttagacctatagaaaagctgcaatgatagcacatagttctcatataccctttacccagtttcccctcatggtaacatattatgtaactctggtacttttgtcaaaactgagaaattaacgttggtacattactagtaattaactccagtcttcatttggattccaccagtttttccattaatatcttcattctgttccaggatctaatcctggatacagcattgtatttagcctgcatgattttgaagatggtgttttatgtaatatgcatgcaagtgttgctctcttccttataacctatccgagttgtttttaggtaagaataaaggttctccctgccaaacatttcagtaaaatattgccaccatgtttatttattgtggctttttagactgtgctgcatactgccacatgctctgtggagggtgaagcaccattttcaaaggacagtcttaggccgggcatggtggctcacgcctgtaatcctaccactttgggaggccgaggtgggcagatcacttgaggtcaggagttcgaaaccagcttggccaacatggtgaaaccccgtctctactgaaaaaaatgcaaaaaaattagtcgggcgtggtggcgggtgcctataatcccagccacttggggggctgaggcaggagaattgcttgaacccagaagacagaggtcgcagtgagctgagatctggagcgccactgcactccagcctgagtgacagagcaagactccatctccaaaaaaaaaaaaaaaaaaaaaagactctaggcattttttgtattcacagcagtaaaatctctgattgcagctctgatttgagcaagaagtagggatcattggctagtgtagggctgggaagagcagaggggcagtgggaaaggatgtatatttggggacgatttgaggggtagaaggttctccaggtgggaggcgacatggtgtttgagttgtgagtggaataaatgtcccggggtcccctggttcactggtcccagctttgtctcttcctatttgcttatctgtcttttcacgtgtatctatttggtgcatcacagttggtcctgcttttgcttgcattcctggtaaactggaataattagagttaaattttcaattagaatgttagcggatgttctgttaataataacagtggcgaacattccacctcactttaagcttcctgtggagctaggtccttggagtccagaagggctggaggagaaagaagccggaatacaggaggggtgatgggtcagctaaggtccccactctttggcctcctccacagactggctccctttgtggtttgcacgtctctgaacaatgtctgctgatgttgtcttccacacacactggcttctaattctctctctctgttgcttaggctagtcttgagctcctgggaccaagggatcctcctgccttgccctcccaaaagtgttgaggttacaggcgtgagccactgctcctgaccctggtttctaattataattgcctcaaaaggttggcaggctggtggggctacgggagggtgtgggaggtatagcacttggaatctggttttggaattcttcctatttttgaaaatatagccagtgacatctgggagagtccagctgaaggctggagggcagggagaggggactgaagacctttccactgtgctggggacaggacaccctgctgggtgggcctgcggtccaaggtccaggacactccctcgggcttacatccaaggtctccccaggcctggcacttactggaggaggcgggctcctaaaggccagcacgcagtcagcacaccaggagggcactgagcatgggcatctcctgagccctctggagaggaggcaactcctttgatctctgggtggagggagccatgatgtgtgtagtgggggcaatgggcattcaccaccatcttcttcctaattctctgctacagattctcttcctgatcttcatgcaataatctcaaatgtctataagaggtgatcactaccataagaacccttgaatagtggttcaaagccttgtcatttcccatccctagttgttcccccaattcagaccatgtcatcaggcagttggcttagaaagaaacatttatttatttatttatttagagacagagtttcgctcttgttgcccaggctggattgcaatggtgtgatcttggctcactgcaacctccgcctgctgggtttgagcgattctcctgcctcagcctcctgagtagctgggattacaggtgcccgccaccacacccggctaattgttttgtgtttttagtagagacaggatttcaccatgttggccaggctggtcttgaactcctgtcctgaagtgatccacccacctcagcctcccaaagtgctgggattacaagcgtgagccaccgcgcccggccaggaacatagatttattgtgccagacatgctttggggtatcgcctgctcattccagcctctgtaggagggaccaggctaaacagtgttggtgtcctaagtccctgtctctgctcactgcccccagtgattggagcagaggtgggcagtttatctaaagacggccaactacagcctggctagtgacccaaagccctgccctgaaccaggagctgggtcagtcacattcctgtctcaactgggaaacagaagttggacccactagcaggtgggatagtagttgaaagagattccaagaggttgaggatgaaaagccaaagccttattaagccaaagtgacaagggaagtgagaaaacagagtgaaagaagctgttggcagagagaggagaacaagaggacagatgtccagagagaagcagagtgaccacgagtcaggggccaaccgccgtcacccttctcagtggctttcccattcccattctgtttctaaactgctagccacatatatccttgccacaaactccccttttccttgaggtgacttaaggggacctctgttccttgtagataaatgagccagaccagaatagagatctgtcttgcccactcctgggagccttgttcccaccttccagcatccttcagatggtgagatattctctagaactttgagttggaacagggagtgtgtttctcatgcataatttgtaccatgcttctggtggattatgtgggaaatgggttctgggggtctgactggggaacctaagcaccatgagagaaaacgagtcttgaattttgaccaaggctctctgtggctggggtctgaacagggtgctcctgtgctgcccagttgggatctcacttctctttccattgcgtctcgaatctaaaatgctacccaagtctctctcactttctaaagcctgctcattttctcgctacctctggaccctgtggctcccacatactaccacctctttcctctttccccagaacttatcgaaggagctgtccacactcactgcctccacttcctcacctcccatggattcctcaactcgctttccacccttccatggaaatgatctgtggtttaatgaggtgcagactttggtcaattttgaaattgctcttgctaaagtcatcaatggccaacttgtcttcaaactacggcttggttcttgtcctcatgctcttctcgctctggtgggtggaaccctttctcctcttttcgtttataagctctcctggtctcctggatgtcactctttcctgctcttcctcccagatctcccttgctgccccctggtctcccttatttcttccactttccactgttggcttctcaccttcagctgtcttctccctctaaactctccccgggtcagctcacccaggctcatataccctctgctcacacagcagtatctccagcctaaacttttccctgagccctaagcatatcatatctcatctgatcattttatcagaacaatcttccatgcatgtctgagtcaacaaatcccacagacgagcacatcttctgctccccaacttgtgcctcctcccgtatttacctattcgtatacggttaccactatgtaaaattgcccaaatgagaaaactggaaatcaagctagactcctttctcatcctcaccctgcacatatagttactcactaagttgtatagcttcttaccagaaatctcactaaactccatccctgctctctgtttccaccagcagtgccttggttcaggcctttatcattcctccctgaattaatgcaaaatatcccaactgacttttctacctccccacacttccagtttcaatccctcctttccatggttgccagcattctctttcaaaaaacagatcaaaacatgccatcttctgtctataagcttccagagtctccccattgccaacagaataaaatcccatttttaatctcagcattcaaggcctttcatagtctatgctgagtttatttcacctgccaccccagcccatcacctactttttaattttaaaaattttaaattaaaaaattttaattaaaaaaaactgttttgtagagacaaagtctcattatgacgcctaggctagttttgaaatcctggcctcaagaaatcctcctacctcagcatctcaaagtgctgggattacgggtatgagccaccaggcctggacccatcacctacttttactgtatgctttgctcagcctcctggcctgtaatcacaatgctttctttcacactctgccttagcacatacaggttcttgtctgaaaagtgctagtccgtctgtctcgcacaattctacttgtgtcctactctgcgaaatccctccccactatcagctaaatagttgtcctctctaaatttccacattcctttatcttcaaagagcacacatagcttcgtattgcagttatttttctttatctatctcactgtactaggctgtaaatattttgaggccaaggatcatgtctgactcaaccaatgcctggcagtgtctggcatatatagtcagtggatgcctattactgaagaaattaacgaatgaacaaatgaatgagtgattttggtttctgggcctacgtctttctttttttttttttttttttttgagacggagtctggccctgtcacccaggttggagttcagtggcgcaatcttggctcactgcaagttccgcctcctgggttcacgccattctcctgcctcaacctcccaagtagctgggactgcaggtgtccgccactacacccggctaatttttttgtatttttagtagagacagggtttccccatgttagccaggatggtatcgatctcctgacttcatgatctgcccacctcggcctcccaaagtgctggggttacaggcatgagacaccgcacctggctcctgggcctatctcttcctaggctgtgaatataaactgtggtgagtagggcttgggaatacatctcacaccctgtttgtcaacatttccccaggacaatgcctggcacaatgctctcagtgctgatgcattggatgtgcaaaaggtcctgggttcaggccaatttagatttctttggcatgaagagcagcaaattaacattcctctctccctattacagatgagacagatgagcttagaaatcttaaacaactcagcaggctgggcgcggtggctcacgcctataatcccagcactttgggaggccgaggcgggtggatcacgaggtcaggagatcgagaccatcctggctaacacggtgaaaccccatctctactaaaaaatacaaaacattagtcgggcgtggtggtgggtacctgtagtcccagctgctcgggaggctgaggcaggagaatggcgtgaacctaggaggcggagcttgcagtgagccgagatcgcaccactgcgctcctgcctaggcgacagagcgagactctgtctcaaaaaaaaaaaaaaagaaagcttaaataactcgtcctaggtgtatggtggcatcagataatctaagggacaggggcattaggggttactgaccaatgtggagccctcagcacacatggaatgattgtgatcccaagcagaattaatgtgggcacattgttctctgcaggctgtaggtcttctcactggggcttgtattccaggaaggggccttctctggctggcccagatttagagtgaggggagtgaggaactcaccacaggcccaaaatgtaaggggcaccgagtaatcaagataaataaaatttaatgcattttttttttctttcagagacagggtcttgttctgtgcctcaggctggaatgcagtggcacagttatggctcactgcagcctggaactcctgggctcaagcaatcctcctgcctcagcctcctgagtagctggaactacaggcatgtgccaccacgcccagctaatttatttattttttgtagagacaggttcttgctatgtttcccaggctggtcttgaactcccggcctcaaaaaattttcctgcctaggccaggcatggtggctcacgcctgtaatcccagcactttgggaggccgaggcaggccgatcacaaggtcaggagattaagaccatcctggctaacatggtgaaaccccgtctctactaaaaatacaaaaaattagccaggtatggtggcaggcacctgtagtcccagctactagggaggctgaggtaggagaagggcgtaaacccaggaggtggagcttgcagtgagccgagattgcgccattgcactccagcctgggcaacagagcgagactccatctcaaaaaaaaacttttcctgactcaacctcccaaagtgctgggattacagatgtgagccactgtgcctggcctaatgcaatatttttgttgtcagtaaactacagtctgtgagctggctgcctgttttttaaaacaaggttttattggaaccaagactgagattagggtgaggtgaatgagacacgatattgagggaagggttggatcttgtgtttatttgaaatcttaatattttgttcatcatcaatttttacattaattttgatttttttttattttgagatggagtctcgcactgttgcccaggctggagtgcagtggcgcgatcttggctcattgcaagctccgcctcctgggttcacgccattctcctacctcaacctccctagtagctgggactacaggcacccgccaccatgcccggctaattttttgtacttttagtagagacagggtttcaccgtgttagccaggatggtcttgatctcctgacctcatgatccacccgccttggcctcccaaagtgctgggattacaggcgtgagccaatgcacctggccaattttgatttttaaaaattgcgttaaagtattatctatcttggaccgggcacagtggctcatacctgtaatcccagcactttgggaggctgaggcaggtggatcacctgaggtcaggagttggagaccagcctggccaacatggtaaaatcccgtctctactaaaaatacaaaaattagccaggcatggtggtgatgcatgcctgtagttccagctactagggaggctgaggtgggagaatcgcttgagcctgggaggcagaggttgcagtgagccgagatcatgccactgcactccagcctggggaacagagtgagattccatctcaaaaacaacaaaaaagtattattgtatttgtcacttttcacgctgctgataaagacatacctgtgactgggcaaattacaaaagaaagaggtttaatagagaattcacagttccacgtggctggggaagcctcgcaatcatggaagaatgcaaggaggagcaagtcacatcttacacagatgacagcaggcaaaaagagagagcttgtgcaggcaaacttctgctttttttttttttaaaccatcagatctcatgagactcattcagtatcacacgaacagtgcaggaagatctacccccataattcaatcacctcccactgggttcctcccatgacacgtgggaatggtgggagttacaattcaagatgagatttgggtggggacacagagccaaaccatatcagttatctatcttgatttctgagttttggggcactcccttaagttgtgttggaggcaaatgccttaattgtctcttagggccttcccccattgtaccgtgggttctaagatgggcagctgccagtaaagactgggccctggggttcagttcccttggttccctggctgactgcagccccaagcagcctggacaaaacagctgtgggcagatacttcctgtccctcaggaattgttgcatgaggttttggtttggcttctttaggaaattaggtctcccttcatccactggtgtttctttgttgaacagctgtcatcagccagccaccaaacgtgacagaattgggtttctcacactgttgcccaggctggggtgcagtggtgcaaacatggcttactgcaccctcaatctcccaggctcaagtgatcctctcatctcagccccaccaagtagttaggattacaggtgtgcaccaccacacctggctaatttttgtactttttgtagagaaggggtttcaccatgttgcccaggctggcctcaaactcctgaactcaagtgatctgctttccttggcctcccaaagtgctgcaattacaagcaccggcctggcttctaaatgtcttctaaagcctgccctcctctgcatccccactgccctgcttgtcagccctgctctcttctgactgtcctcctgcctccagccccacccctttccacaccagccttcacagtgccaccagggtcacctggacaaagtgcacatatccccttggtgtttccctgctcaactctccagtgccctcggcacggagtcccaatgcaaaggcagtttcaccaatgccctgacctgacagactttctccttgatcaaacctgagtcagggtcctctgggtcctctttttgacagcatcttgaccttgggctgtgtccttgggcaatttagtccagttgtagcatgaatcctgccaggcccatttagcaaaaatcccctatccttcctatctgatgaaattcctcatcctccacccttgatatcgcatcaccctggcctgccttcagcaggaatcccctggcctgaatgcttctccttagtgattttccatccactgaccccaccctgttccttggctataaatctccacttgtccttgttgtctttgatcgcttttccctattgccaaaccccagtgtagcagccccgccccccttaaataagatcttccttactgtctttaataagtgttaagaataattttttctcagccgggcacggtggttcatgcttgcaatcccagcactttgggaggctgaggcgggtggatcagctgaggtcaggagtttgagaccagcctgcccaacatggtgaaaacccatctctactaaaaatataaaaactaaaggcgggcgtggtggttcgtgcctgtaagcccagcactttgggaggctgaggcaggaggatcacaaggtcagaagatcgagaccatcctggctaacatggtgaaaccccgtctctactaaaaatacaaaaaattagcctggtgtggtggcgggcgcctgtagtcccagctactcaggaggctgaggcaggagaatggcgtgaacccaggaggcggagcttgcagtgagccgagatcgcgccattgcactccagcctgggtgagagtgtgagactctgtctcaaaaaaaaaaaaaaaccatatatatatatatagtttatatatatggtttatatatatagtttatagtttatatatatggtttatatatatagtttttatatatatagtttatatatacatatatatataaactagccgggggtggtggtggatgcctgtaatcccagctactcgggaggctgaggcaggagaattgcttgaacccaggagacggaggttgcagtgagccaacacggtgccactggactctagcctgggtgacagagtgagactctgtctcaaaaaaaaagaataattttttctttaacagaacaaattgcctccctgagtcggaccagctgcccgtggatcctacgctgcagtcacaccagactcctcatgttgtggggtaagtgtgtcccctttctttcctgcttctgtctttatacacacagtccctttcctttgatacgttttctcctctcgtctgcctctgagccagccccaagagtcttctccgtgcttcctgactcctctctgcttagctgttaccccatttgttcctctgcaccatagttaaacctatttacaggtctgtgtcccccaccaaactgtgagctccttgaaggcaggcgatgtccattttgtatccccccgaaaaccatccccctacccccagtacagactctggcacaaaataggcattaagtaaatgaatgaaggaatgaatggatggaaaggatgccattgtaggggggaaagagtaatatctattacttttatttaaaaaaaacttttaatttccacttctaggcatatatcttttccttatctgtcacaaagttcatggcttgagatccctataacaaaagatagattaacaagagaaaagcatacacatttatataataagtttccgtgacatgggagatgaagacccagggaaatagggaatactgtgtatattttatgcttaggtttaatgaggagtagagcgttgtgtagaaacatgatggacgaggccaggcgtggtggctcacgcctgtaatcccagcactttgggaggccgaggcgggtggatcacttgaggtcaggagttcaacaccagcctggccaacaggatgaaaccccgtctctactaaaaatacaaacaattagctgggcatggtagcgcacgcctgtaatcccagctactcgggaggctgagacaggagaattgctggaacccaggaggtagaggttgcagtgagcggagaacacactactgcactccagcctgggagacagagcgagactccatctcaaaaaaaaaaaagaagaagaaatatgatggaagaaagggggtatgatctaatagtaatcaacttgggggagcttagcaaggcctgtttcttcagattcttctctgcttcttcattcctttcctctggatatagggaggacccctctggaatgagggtcttatgacctactttagaagaaagacagaaaattctttcatgatctgcttcaggggagaatagtagcagcaagtcagagagatcttcctccttctgctgcttttgccgaggtgctgtattttggggtagcatgtcctgaactccatcaccatcttgtttgcccctttaggatctgccagcaagattttgagcaaaatcctaatctctggcctcattttagagcttgtagcatcaggtttggaggctaggggttcctggtgccccagcaccagagaggagggtgagaaggccaccttgggagagctgggccatttcaggggaggaaattaaaactaaattgcattaattggttttcatattgaaccctgcttcttaagtgtgctaaatgtctggttaaacaaatagctaaaaagatagaatcactttgctatcattttttgtggtaagggaaaagacaaaaaaacaaagatgttgatttaagatatagcctagggctggggggctgggggaaacctggtgaaggctcctgttgtttggggtcggaggtcgcaggagcagcggctgcctggggatcaggctcaaggttctggaatgatggaaaaacctggcctgacgcttttcctcagcggacccttcactggctaacaggagccagctgagcgaacacagaggcgctgtaaccggcgcagatcccagcttcctctgaaatttccaggcctcttttttcctgtcggattccagacagatgaaattttcctggccccggcccattcctggcagcatctcccctctgaatcatcataaatcagggcttggcggggagcggtgggattttcctgattttcctgatcgacacgctgctgccctggtaaaatggggctccgtttccaaggctaaaaatagctctggggtgcttgcctgagttctccccatcgcaagttgctgcttcgtattgtaaatattcatatctgtctatgattattatttcatcgagaagggctgtggacgtgcagatgcgggccgctgggggcctcggtggtctgaagtgacaccattgttcacaggatcatatgcgggggcctgtgcattcctcaaagcctccatcatccaaggagcccccaattaatttcaatacaaacaccggatatggcctcccccgcgcctttgcagccataacacatgaggtcatgctgctttggttaacccgaggagttgcagagtgagatggggaggcttctaggccccaggggaggcctggggtatctgccctgcctggtttaggcgaggctgtttactgcaatggggtctacggcacacccacactctctcgccttccttcactcagaaactgaaatctctgattcccgatgtctcttcccagccactctccccatctctagccacttggctgccaacccaccacccacccctgtggttctttgcaaactccttaccctccgtgctcttgcatacacagcttcattcacctggggcatctttttacctcttcatcaggctccttctggaagattcacctcaggagtttcttccttcaggaagcatttcctgatcactccattcagggttaagtactgttttcttggctgggagcagtggctcatgcctgtagtcttggtactttggaagacggaggcaggcggatcacttgagctcaggagttcgagaccagtctggccaacatggtgaaaccacatctttactaaaaatacaaaaattagctgggcacagtggtgcatgcctgtaatcccagctactcgggaggccgaggcaggagaatcgcttgaacacagaaggtggaggttgcagtgagccgagattgcgccaatgcattccagcctgggtgacagagtgagactccatctcaacaacaacaacaaaattaaatttaaaaaaaaagtacttgctgggcgtggtggctcgcgcctgtaatcccagcgcttggggaggccgaggctggtggatcacctaaggtcaggagttcaagaccagcctggccaacatggtgaaatcccatctctactaaaaatacaaaaaagtagctgggcatggtggcaggcgcctgtgatcccagctactcaggaggctgagtcaggagaactgcttgaacccgggaggcagaggttgcagtatgccgagatcatgccattgcactccagcctgggcaacaagagcaaaattccatctcaaaaaaaaaaaactaccactttcagccgggcagggtggctcacgcctataatcccagcactttgggaggccgaggtaggtggatcacaaggtcaggagatcgagaccatcctggctaacacaatgaaaccccatctctactaaaaatacaaaaaaattagccaggcgtggtggtgggtgcctgtagtcctagctactcaggaggctgaggcaggagaatggcgtgaacctgggaggcggagcttgcagtgagccgagatcactgcaactgcactccagcctgggcaacagagggagactctgtctcaaaaaaaaaattccactttctcttctgtgttcctacagcttattgattctcaaacattagccctcatcagaatcgcatggagggtttgctaaaacaccgattgctgggcccctcccagtttcagaatcaataggtctgaagtagggcttgcacatttgcatttctaacaagatctcaggagacactgatgctgctacagccccctgtgatcacttcctccattggtggaacttaccctgctgtgctgcaattacccgcctttttcttttcttttcttttttttttttttgtttgagacagggtctcactctgtcacccaggctggagtgcagtggcgccatcttggctcactgcaacctctgcccctgggtttaaacaattctcctgcctcagcctcccgagtagttgggattacaggtgcctgtcaccacacccggttaatttttgtatttttagtagagacggggtttcaccatgttggccaggctggtctcaaactcctgacctcaagtgatccacccgcctcgacctcccaaactgctgggattacaggcgtgagccacctgtccggccacctgcttattttttgttccctcccactgggagggctgggactgtcttttccatttctctatcctactgcttggcaaacagtgaagctgatcactggaggtttgttgactgaatgaattgtggatttggaaccaacctgctagttgtagagctcagttgaggggaggaggtctgctggtgagagggctggttctcagggcttttggggtcatgagtatgttacctgaaagggggcccaatccagatcccaagagaggattcttggaccttgcagaagaaagaattcggggcgagtttatagagtaaagtgaaagcaagtttattaagaaagtaaacgggctgggcgtggtggctcactcctgtaattccagcactttgggaggccgaggaggcggatcaccttaggtcaggagttcgagaccagcctgatcaatatggagagaccccatctctactaaaaatacaaaattagccgggcgtggtgactcacgcctgtaatcccagctactcaggagactgaggcaggagaatcgctggaacccaggaggtggaggtggcagtgagccaagatcgcgccattgcactccaacctgagcaacaaaagcaaaactccgtctcaaaaaaaaaaaaaagaaactaaatgaataaagaatggatactgcataggcagagcggcggcatgagttgcttgactgagtatgcttattgttccggttttttttttttttttttgagacggagtctcgctctgttgtccaagctggagtgcagtggtgcaattcagctcactgcaacctccgcctcctggtttctagcaattctcctgcctcagcctcccaagtagttgggattacagctgtgcgccacaacatcaggctaattttttatatttttagtagagacaggttttcatcatgttggccaggctggtcttgaactcctgacctcaagtgatcctcctgcctcagcctcccaaagtgctgggattacaggcatgagccaccacacccggctatagttatttctttattatatgctaaaaagggatggattactcatgagtttcctgggaaaagggcagagatttcccagaactgaaagtccctacccttcttagactatatagggtaacttccggaaggtgccatggtatttgtaaactgtcatggtgatggtaggagtgtcttttagcatgctaatgtattataattaacatataatgaacagtgaggacgaccagagatcactttcgtggccatcttggtttgggtgggttttggccatcttctttactgcattctcttttatcagcaaggtctttgggacctgtatcttgtgctgatcttctgtctcatcctgtgactaagaatgcctaacctcctgggaatgcaacccagcaggtctcagcctcattttgcccagctgctactcaagatggcgttgctctggttcaaacacctttgacaagtggggatcaccccaacccccccaggtgaatgagcacaattccctctccccacgcaagtctcccataaagtccaaaacaagagggtcactgattcacaagtacacaaatacacaagtcatgaaattccatccttgtaaaggatgccaatcagagatgccagaaggagaaatggggaatcaggattttaacttgattttcttcctctgaaacctggaaatgccaagtgatgaaaggataccagaaccccggcctttcctttgaattaggtctggaccccagccccctttcctgccatcttatgctctggccacacagtagggcaagatctcaatccctgcccaaactacaaactccttgaggacacatcctaagtcttaataatcttgagaactactccttcaccttccacataaggatctgtgttttctttcctttttttttgagacagggtttcactctgtcacccaggctggagtgcagtggcatgatcatggctcactgcagcctcgacctctttgaactcacgtgattcttccacctcagccacccaggtagctgggactacaggcacgcaccaccattcccagctaatttttgtattttttgtagagacagggtttcgccatgttggtctcaaattcctggtctcaaataatctgcccacctcggcctcccaaggtgctggaattacaggtctgagcctctgcgccccactgcctggatctattttctatagttccttcaatgtatcgtttcattcacacctccaagcctttgctcatgctgtttcccctgctcagcattcctgtgttccttctttgcaggtggacatccaactcactgatttaagactgagtccaaatgtggctacttctgggcaggtcttagaggctcatttgcttctctgggctctcacatggtggcagctttactgccatgggtctggttcctgtactagatgggttgtctcgttcattctttatgcctgttctccagcctctagcactgtgcctggttgacggtgggtgttcagttggggcatttggaagtggatcacacctgctcatcttccttagcagctcttgtttgaggtagatcaggttggggcattgctcccactcttagactgccagagctgcttggctgaataaggagtctccttccccactcctcattcctgtctgctagccacatgctcagctggaagggataactggttggggtgaaagaggaaagagccaggcagttggtgttgctcagggagtgaggcctctagaccccagccagagagggttcaaagcccggttctacttctgaccacctgtgtcaatttgagcaagtcatttgttgttattgaccctgagtttcttcttttgtaaaatggggataattatgtggtttccaaggctgtaggaaggaataaagatgacatacaccaagcttcaggtacaggccttggcatgggccgcctttccctcttcatcaaagcttccgaacaaggactttcagctttctcttgtaagtctcagcaatggtcagcttttttttttttttttgagacggagtcttgctctgtcgcccagactggagtgcagtggtgtgatcttggctcactgtaagctccgcctcccgggttcacgccattctcctgcctcagcctccccagcagctgggactacaggcacctgccaccacgcccggctaatgtttttgtatttttagtagagatggggtttcaccgtgttagccaggatggtctcgatctcctgacctcgtgacccgcctgcctcggcctcccaaagtgctggaattacaggcatgagccaccgtgcccggccagctgcaatggtcagctttacacatgccccttccttaattttctttcagtgacagagaacagcagtctgagaggggagtccatcagggctagaagcaagctgctccacccaggccaatttcaactggaaaatgagaccttagataggagggaggaaaaattattaaaggattaaatccagaataatcctataagccccaggaggctcagaaagcaataagccacagacttaaaatctggtctatgaagtcacgggggtggaatcagcatccgaaggcagggagcgggtttcaagtgtacactgtggtcagatctttgctaaaatatggcctcattttggccacttggacagcgttttgttggttttttttccccctcatcttgtcatggtttttaataacaatgagcgagctgcaggagtgggggaactcttgctaaaattccataaaaataaaaatttaattaaaatacacaagtcgtgaaattccatccttgtaaagtgagacatctcagaactctgccctgagccgatctcggtccctggggtcccaggttcacgctggctcctccttgggccctgttagagaagacacagcctcatccaggatccttgttgccagcaaagggaggaggcgtcttccgattcctcctccaaactctctcctgggtgaaagagatccccagtgtcctgcccttaaaggccaggagggtcacaaggctgggatgaagggtatttcatgggactggaggcaggcccctgcatgtgagctgtgggagggactgagcacctagccttttggggagaaagtgtggttttcaccttttcctaggcagaaggaggggcatagacctggccactgaagcccaggagtcttgcattccagtctcaatgacatcacaattagccgggcaacatgagcaactcacttctttgtgggcctcagtttctccatctgtaagatgggttgattaggctagaccagggattttccaaggtgtacaatgaggagttttaaggatttcacaaaaccctccttagcacctctcaggagtcttggagggtcaaggctctcctcctcctgcccccttccctgcctccttttgtctgtttcacagattgggctttcctgtaagattttgtttgaacaaagggtgctgaggctgaaaatgcttgaacacctccgaggatccttctggctggaagggtctgtgatctgccctttagtgtctggctctgcttctatctggcagctgcttcctgcgttagtgcatgagggcctcgcccctcccactgccatcttttttttgctctactattctgagccatggaactccaagaatctgatgaaagctaccaatcctctccctggaaaaatatacacaggaaaatatatatgcatacagtgaaaatataactattggagcatccagatcccttttgatcaagaacctgtctttgtttgggaaaattacttgacgggactatgggccccagggcagggtatgaaaggcaggagcagaaccaagggaggaccctgctgctctgcgtaagaaaagggttaacttcacggattatctcaccaccctgcaggcactgcccttgctctgctctgattgacctagacagaaatcagcccttctccatgacatcaataccagaagctgtgttgtagacttggctaaaggtttgagggccagcaaagcagagtagattgaacctcctttgtatttagtcttctggtagtgagtgattgaatctcaactcgaatttcttgcaagaggctgggcgtgatggctcacacctgtatcccaagcactttgggaggctgaggttagaggaacacttgagcccagcagtttgagaccagcctgggcaagatggcaaaactccatctctacagaaaaacaaatttaaaaattagcaaggcatggtggcatatacttgttgtcccagctactcaggaggctgaggcaggaggatggcttgagcccgggaggttggggctgcagcgagccatgattgtgcttactgcactgcagcttggaagacagagtgaaaccctgtatctaaaaacaaaaaaaccgggcccggcgcggtggctcacacctgtgatcccagcactttgggaggctgaggagggtgcatcacctgaggtcaggagttcgagaccagcctgaccaacatggtgaaaccccatctctactaaaaatacaaaaattagcagggcatgatggcgggcacctgtaatgccagctactcaggaagcagaggcaggagaattgcttgaacctgggaggcagaggttgcagtgaactgagatcgcaccattgcactccagcctgggtgacagagcaagactctgtctcagaaaaaaaaagaacaaagaaaggcagatggaataagttgactcatcttactgggaagttgccagtggagccaagattgtgagttgcacaactcaaagggggcaccattcacattctggcagctctcacatctggctcaactggatctagggactcaaaggacacttctcttcttgtccccctgtctctcttggctcagcttcttttgaccttggcttcagtctctttccccgtaaagaggcctcttccctacagttgagaagatggccccaataactctagacctactgcacaccagcctagtaacacctgtggctgggtgggctgggatatcatagatggcagaacttccagaaacatggaattggggaaaggcagttctctgtttttaccagatagtgaaagggacactaggcaggaaaaacaaacaaacacacacactcacacacacacacacacacacacaaatgtaacatgaacatctactctgtcttactgatccttgaacatctagccaaatctgcaacacacttgtatatgagtgatttttttttttttcgcaagggagtcatggagaagagaacagaacacgagtagtacctgcaagatgacaagatgattcacagactgaattaccttggaagattgtagagccagtgataaccaggaagtcattagccagttcccagaatccctggggggcctgagagtggggtgcatgtgggatggagtagatgctgattttatttgaactcaaaggatcaggtgtggtggctcatgcttgtaatcccagcactttgggagatcgaggggaaaggatcaatcacttgaggccaggagtttgagaacagcctgggcaacataaggagaccccatttctatgaaaattaaaaaaaaaaaaattagccaggtgtggtggcacatgcctctagtcccagatattcaagaggctgaggcgagatgattgcttgagcccaggagttcaaagctgcagtgagctatggttgcaccactgcaatccagcttgggtgacagaatgagacccttacttaaaaaaaaaaaaaaagttggatatcttggctgatgtctggattatacacacaaaatactgcatacaattctgggacttcaggatctcccaaaactcatgcagtggagagcccccattttggatcctatctctttttttggttctcacttttttttaaccactctcatcggtgtacttcctctcacgccacagattccagggctgaggcccccacccctaacactcaggcccctctagctctactctgagatgtgatacatacactccctgggaattttctggactgtcctcaaaggaccactgggcaatcctggcattctgcatttgtaccagttctcctctccctcaggatgatgcagcagtcccaagagaatcaaaagtctcctgctacccccacccctcccgtccccactgctgagaacctgtccttcccgatgatgtcatacctggcacatgggccttagctagaactagcagctgcgggtcacccactgcaggccgctcctggcaggggagcagtaacaacttggtcctgagcctgagctgctgcaggatttactactacctgcttttcttggatctgacaactacagaaagcgttggagaaaggattttgaatttgtcccaagaaaataattcaaaagaagaaaagcactacaggcaagaaggtgtccactggtatggtagtgacactaatcaccaacaacctagaagtccagtaatgagaagaaccaacatttgccctgcatttcacattactccgcctgcctcctcacgattaccctgtgagctgggtaggcacttggtccaagtttacacaatgagtgagtagccgagctagactttaagcctgagctctctcaactacgccactatgatggtattctctccctctgatttaaccacttgttttatgcaagttaagttagttacaaatgccttctactgattgctggcttactctgtgcagggcattgtaccagatgtgccacagacgggctctcatcaagtctttctccaaaccctgtgagatggatattattttaaagatgaagaaactgaggctcagagtggataaattatttgcccagatcacaaatgtgttttaggttttgtctgattattataactatcacaatgatgaattacattttgattccagctttttttttcttttcttttcttttttttttgagacggagtctcactctgttgcccagactggagtgcagtggcacgatcttggctcactgcaagctctgcctcccgggttcatgccattctcctgcctcagcctcccaattttttatatttttagtggagacggggtttcaccgtgttagccaggatggtctcaatctcctgacctcgtgatctgcccgcctcagcctcccaaagtgctgggattacaggcgtgagccaccgcgctgggccctcttctttttttttttgatacagagttttgctcttgttgcccaggctgtagtacaatggcatgatctcggttcaccacaacctctgcctcccggattcaagcgattctcctgcctcagcttcccaagtagctgggattacaggcatgcgccatcacgcccagctaattttgtatgtttagtagagatgaagtttctccatgttggtcaggctggtctcaaactccagacctcaggtgatccacccgcctcagcccctcaaagtgctgggattacaggcatgagccactgcaccccacctccagctttttcccttcccttcccttcccttcccttcccttcccttcccttcccttcccttccctcccttcccctcccctcccctcccctcccctcccctcccctcccctcccctcccctcccctcccctcccctcccctcccttcccttcccttcccttcccttcctttcctttcttttctgtttttgagatggagtctcactctgtcgcccaggctggagtgcagtgttgtgatcttggctcactacaacctctgactcccaggttcaagtgattctcctgcctcagccttccaagtagctgggattacaggcacgcgccaccatgctcagctaatttttgtatttttagtagagaccaggtttcgccatgttggtcaggctggtcttgaactcctgacctcaagtgatctgcccccttgacctcccaaagtgctaggattacaggtgtgagccactgcacctggctggcttttttctttttaaaaattatttccttggaataaatgaaaattatttctcctctctgagcctcagtctatctgcaaatagtgactactctgtagggttataggagaatgaggtgaggtgtcctatgtaaaaggaccaggcaaagattggcatttaatgagtctccatcagtgtggggttcctgccttccttttgggacccttgagagcagcttctgtatttgctcatcattttagtcaacaagatggttcagggctgggtggatgcttgaccacatatgcagatggctcagagctgggagagtaaatgaatacagcaaatgcaaaataaagtctgcagggtcctcacttggccagggcaggcagaatgactgttttctagagctactgtaaagtcctacatttgggttttgaaaatcagtgtctccgctgggcaaggtggctcacacctgtaatcccaacattttgggaggccaaagcaggaggatcacttgaggccaagagtttgagaccagcctggccaacatggtgaaaccctgtctctactaaaaatacaaaaattagctaggtatggtggtgcacacctgtagtcccagctactggggaggctgaggcaggaggattgcttgaacctgggaggcggaggttgcagtgagccgagatggcgccactgcactccagcctgggtaacagagagagactctgtctaaaaaaaaaaaaaagaaaaaaaaatcagtggcacaattatgcaatggtgggtgactaggctttccttacagttcatggggcatagacctaggggttttagtcaaccacaagatcaaaagaaaattgtctgtgagatacatccgttaaaatactaatggcatcttgggcaggaatcagggacagtgtccatcacacagggggaaacagtcccactgcacaaccacatctagagtgttctgacccattctaggacccatattttaggaaggacactgatatattggagtatatacagagaaaggatggggaaggtgacagagcaggagcaccgtcatctcagacagacaccgtcactttaagttccagctgcctttctagcctcatgcatttcagggaaatcacttcttttctaactacaaacagccagaaagagcagacagtaaaacagataagacagcttgggcacaaagggaggtgggggaaagtctcttgggtaactgccaaactttcccctcatacaataaggccccagtaaaatagtgggccttaataagcacattcctttcccttcaggtgcactaagacagggaagctaaaagcagactcaggggtatgcctgcagctgcacaaagatgtatgggaacagacacacaactctccctcccagataagcacaacaacaagacacagaagcattccaagcctctgataaactctcccaccctgaatccttaaaaactcttagtctgtaagagagtgtgcctcccacctaactcagccagaagctcctctcatgtttgttttctctaaaataaacctgtcttgactggtgagccacctttcatgtttccttcctctttctttaattcttacagaagggtctggaaataaatggaggctgaaggaactgagatgctgagctgtgtattagttattaattgctgtgtaacaggttatccccaaacttgctggcttaagaaaccatacacgtattatctcacagtgcctgtgggtcaggaatctggtatgagtgctctgctcagggtctcacaaggctgcagtcagggctttggtcagggctgtggttcaggggaggaggattcgcttcaaagctcattctcatggctgttgaccagagacattagttcctgccctgtgctaggcagctcgacatgacagttggcttcccccagagtgacggctctgagggacaggaagaaagagcaagcaagatggaagtcacagacttttggtcacctaatcttggaagtgacagcccaccactcttaccctgttctgtttgtcactatgtccagctgacactcaagaggagggggtacgagaggtggggctccttggaagccaccttagaggctgcctaccacaggggaggaggagggaatacgaggtgggaggggaggacagaggacagacatgctctttattaagaaggggcggctgttgaattgcatgtggattgtggacatagaggggagaactcatgagtgagaaatggcagggaggcctattcagctggtgtgtcagttagaactgcccaataatggaaaggactgcctaggtagatagtgagctccctgtcactggttgtatccaagcagaagctgatgccctgtcagggaagtggtagagaaggttctgctttggggggcaggctgtactgtcaggcaagcctctgattttctgccgtttgaactttcaggtatttggaatttaggaatgattagtgaagcaatctctacctaatcatagcagaatctacttaaatagtaagctctttcactttttgaaagtaggattttctacaacgtggtagcaagtgggtgggactatcttttgagcctctgtaataggccaagtactgtatcacttactcctgctaacaactctcccatctcacagtcaagctcctaggattaatatggtggctccagagtgatggggacccaggctccttctttcttttgctcagccagccttagagcattgcctttgtctgcatggcccaagacagctctccaccacttctgtattcccaagcaaggataaaagaagggtgtaggaaaaggtctgactattttttatatttgtctgcggacagttttttgttttttttgttttttctgagatggagtctcactctgtcacccaggctagagtgcagtggcacgatctcggctcaccgcaacctccaccccctgagttcaagcgattctcctgcctcagcctcctgagtaattgggattacaggcacctgccacagcgcctggctaattttttcgtatttttagtagagacagggtttcaccatcttggccaggctggtcttgaactcctgacctcgtgatccactcacctcggcctcccaaagtgctgggattacaggcgtgagccaccacgctcggcgactgctgacagcttttaagccctaccctctctcttcactttgtgcccatgtctggctagctgaaaaagcccaggaaagttagcatggtggtacactggaggctgaggattgcttgagccaaggagttcgaatccagcctgggcaacatagggagacccaatcacaaaacaaagaaatcccggccaggcactgtggctcacacctgtaattccagcactttgggaggccgaggtgggcggatcacaagctcgtgagattgagaccatcctggccaacatggtgaaaccccgtctctactaaaaatacaaaaattagctgggcatggtggcgcgtgcgtgtagtcccagctattcaggaggctgaggcaggagaattgcttgaatctgggaggcggaggttgcagtgagctgagatcatgccacgcactccagccttggcgacagagcgagactctgtctcaaaaaaaaaaaaaaaaagcaaatcccaggagttcccttctttggtgtcagcaggaagttcaagtcacaaacttgatccctcacgccagccccacccccaccccaattttatattcaccataaaaatgcaggacaggtgagcccccaaattggggcttagaccaggcgggtgcttagcttcacccaagaaagaattcaagggtgagccagtggtgtaggatagcaactttttaaaattttttttatttttgagacggagtcttgctctgtcatccaggctggcatgcaatggcgcaatctcagctcactgcaacctctgcctcctgggtttaagcaattctcctgcctcagcctcccgagtagctgggactacaggtgcacgccactatgcccggctaattttttgtataatatatatgtatatattttgggtcgggcacggtggctcacacctataatcccagcactttgggaggctgaggtgggcggatcacctgaggtcaggagttcaaaaccagcctgaccaacatggtgaaaccccatctctactaaaaatacaaaaaaaaaattaaccagatgtgatggcgcatgcctgtaatcctggctacttgggaagttgaggcaggagaatcgcttgaacccaggaggcagaggttgcagtgagctgagatcgtgccattgctctccagcctgggcaataagaatgaaactctttctcaaaaacaaaaaacaaacaaacaaactatatatatatattggagacagagtttcgctcttgttgcccaggctggagtgcaatggcgcgatctcggctcactgaaacctctgcctcctgggttcaaactattctcctgcctcagcctccagagtagctgggattacaggtgtgtgccaccacacctggctaaaattttttttttttttttttgaaatgaaatctcgctctatggccgaggctggagtgcagtggtgtgatctcggctcactgcaagctccgcctcccgggttcacgtcattctcctgcctcagcctcccgagtagctgggaccacaggcgcccaccaccacaccagactaatttttttttttttgtatttttaatagagacagggtttcaccatattagtcaggatggtctcaatctcctgacctcgtgatccgcccgcctcggcctcccaaagtgctgggattacaggtgtcagccaccgcacccggccaattttgtatttttaatagagacggggtttctccatgctggtcaggctggttttgaacccccagtctcaggggatccacccatctcggcctcccaaagtgctgggattacaggcatgagccaccgtgccagaccaattttttgtatttttagtagagatagggtttcaccatgttggccaggctggtctcgaactcctgacctcaggtgatccacccacctcggcctcccaaagtgctgagatttacaggcatgagccaccacacccagccttggatagcaacttttattgaagtggtggtgtacagcagcagcagagagactgctccttgcggagtatggctacctcataggcagtgtgcccagagtggcagctcagaggcagttctgcagtcatatttatacccaccttagtcatatgcaaattaaggggcagagtatgtatgcagaaatttctgaaaaatgggtggtaacttctaagttgtcaggttgttaccatggaaagggacagtaacttctgggtgttgccatggcaatggcaaagtaacatggcacagtggaggccatgtcttaaagagaggtgctttcccctccttccctgttttagctattactcagtctgattcattgctgagccccatctctggagtcaagtcccacctcctacctcaacatgaccaaatctaactgcaagcaaggctgggaaatatagtctctcttgggcagccatatgctcagctgaaattctagtctgtcgttaatggaagaagaggaggatggatatttggggccacatcacctttctgttgaggcagaaactaagacacagaaaggctaaataggccgggcacagtggctcacacctgtaatcccagcactttgggaggtggaagtgggcagatcacttgaagccaggagttcaagaccagcccagccaacatggtgaaaccccatctctataaaaatacaaaaattagccaggtgtggtggtgtgcacctgtagtcccagctactcaggaggctgaggaacaagaatttcttgaacctgggaggtggaggttgcagtgagctgagatcacgccagcctgggtggcagagcaagactctgtctcaaaaaaaaaaagaaaacaaaacaaaagaaaaagcctggtgcagtggctcaggccgtaatcccagcactttaggaggccaaggatcagctgagatcaggagtttgagaccagcctggcctgcatggtgaaaccccatctctactaaaaatacaaaaaaaggtagccaggcgtggtggcgcacgcctgcagtcccagctactcaggaggctgaggtagaagaatcacttgaacccgggaggcagaggttacagtgagctgagatcgtgccactgcactctagcctgggtgacagagtgagactgtgtctcaaaaaaaaaaaaaaaaaaaaggctaaatgaattgcccaaggccacagagtcagaactccatgccatcagtcctggtgccattgcagagagaagtgccactgttaccaaaacactaggcatttggtctaggtcctgctgttcgccacatagaaagctaatgatgactgagatgacaaatattgtcaaggaagaagactgtaatcgggtcctacagctgagaagttgggagctcagtctcaaatccatctccccagtggactaaaactaggggtttatatagcagggaagaaatgtaacaatgttcaagataacaggaactagggaggggcaaggaagcaatcataatgaataaggaatgggcatctatctcaatgtccggatgtggcgatctggtgagtttcagttctttgatactttttttttttttttttagaggcctgaacttcttttcctgaggaaggaactcagataaaaacaaatgtaagtttcaagctttaagaccagaaggggcaatatctatgtttatccaaaaaaactgtctgtttattgggtaggtctcaccactttgtctcctgaatgtcttcccgaggagactctgatctccttgagggcagggcatgtgcctttcctgtctggaaggcacctagtaaatgcccaataagcattggttgttattgtgaaagagcagtaactgattcacagctgcttccatagcacttcctggactccagcactcactccggaccaggctcaagtttctggatgggtaggagggctggctgggaacaaaagaaaacaaaggaaagctgatttggttctttgttctgtgtagccctgtgctaagcttccccgtcctccagcagcttgcacagaccctggttccagcacttggagttttactgcaataatgctccattattgctgtgttagagtgttattatgtatttccatgtctgtccctccccctagactggaaatgccttaaggtttctttagtcccaggacctagatcagtgcctggcatataacaggtgtcttgtaaatgaccgttgacttcatgagtgggttttatgtattgtattgtactgtagtgtattctagagtattgtattctagaatattgtatatgtttgagacagtctcactctgtcacccaggctggagtgcagtggcatgatctgagctcactgcaacctccacctcccaggtttaagtgattcttgtgcctcagcttcccaacatagctgggattacaggcgtgcaccaccacacccagctaatttttgtaagtttagtagagatggggtttcaccatgttggccaggctggacttgaactcctggcgtcaagcaatctgtccgcctcagcctcccaaagtgctgggattacaggcatgagccaccacgcccagccaaatttttgcatttttatagagacggggttttgccatgttggccagacaggtcttgaactcctggcctgaaattatccacctgcctcggcttcccaaagtgctgtgattacaggcatgagccactgcacctggcctgcatgagtgaagaactgaaaaaggaggacagaaggaaggttggggacaggatcgaggtttagcagggtgtcagaaccaccgtactagccagttttactgcaataatgctccatgacaagccctcccagaacactggcttacatcaaccagtgtttattcacatattttccccactcatgagtctgtgagtggggagtcgccactcataaggctggctctgctggggctgagctatacttggctctgggcttaaccttaggtatgctccgtgtgtttcttccctttcttgggcaagttgctgtttggcatgtgcccttctcatggtgaatggcaggagtggaaacatggtgccacttcaggctttaccttggaactggcatgctgttgcttctcacatcccattggcccaaactggtcacatggccaagcccaatgctgctgggtagggaaatatattccacccactctcctgctccaaggtcacaaggtaagtcacatgaagagctgaagaacaatctaccacagcttccctgaaacaaaacccagaacctcttatgttcctccagtgagaaactctagaagagtggctgctggtccctgagtgccacttgtggtcctgatagccctttcctcctgggtttatggcagaaagagacaattgtccccattgcccattgcccctttctttcttttagtaatagaacactccaggttttagttaggcatgtggtgcccactaggggccacatttcccagcctcctttgcagctagatgtgatcatgtgactaagctgtggccaatgggatgatgcacaaatgccacaggcacctcctgatgacagttggtatgaggaagctgcatgtcctcccttcctctgtcctccttgccttgggctggaatgtgggctcacatggatggtgaggtagcttcagccatgaagacaaggacaacactccaggatgacggagtaacacagcagaaggaatctgggtgttcacacaagctcctggtgtttgccctggttgcctgcccaaccctggtccctaaagtgagagaaaaataaaattctcttctgtgttatatttttgtttcttccagcatcttagcctgtatctcaactcacataaagtccctcacttgtcatccctttgctgcccctgctctggcacctaaacaccccttgcctaccttttatctcccattcaccaacgtgtggacccaaatcccttttcttgattttccttagcaaaatggagacaggatggagtttttaaaaatcgtaaactacaaagagtagtcaacggcaaaatagaacccaagaaatgaagcagaaagcaatcaagtttccatcacagagatacctcgccccatcatggccattacccagggcagtgtgattgggctttgcccagggggctggaaatttagaggatatggaatttaaaacaataattgcggaaagtgatgaaagtgaaactgttgtgacatttttaacattttgacagcacatgcacccctgcatgacacagaaacaaagggatttggcccttccataggaagcttccagaaggcctgtggttaataacacctccttcatgattcctagatggaaaaccaaagttggtttgagggtgtgtttcagacccttgcctgaggcagccgaagtgccagttagagctctgtgtcctaccaaaggtgactcaccccatggactctgcaccttttcactctcacctttcagaatttccaactattccgatttcatggccacttttatggagcttcttgatccgcaaacttcaggctacttccctccaacccacatcatcttatctcctgccctctctgacctgggctcctggccatgacatttctttcttggccaagaccaggaaagttccccctaactctctggaacccttcttcatcatgccaggttccattcacagtgacttgtgtcatccctagaccattgccaggaatctgatgatgagtccaagaaataacctgtgacccatattttccagagtcctgcaggaatttgacatttgtagatctcaaagtctcacaattgctttttttttttttttttttgtcttttttagatggtcttgctcttgctctgtcgcccaggctggagtgcagtggtgcaaacttggtttactgcagtcttaagtcttaacctcctgtgctcaagtgatcctcctgccccagcctcccaaagtgctgggattacatgcatgagcccccatgcccagcccaacaatttcttaattatactatagcctttgcttccacaggaaggaagggaggaagaaattatttttttttccgagacggagtctcgctgtgtcgcccaggctggagtgcagtggcgtgatctcggctcactgcaagctccacctcccgggttcccaccattctcctgcctcagcctcctgagtagctgggactacaggcacctgccaccgtgcccggctcatttttttgtatttttagtagagaccgggttttaccgtgttagccaggatggtgtcgatctcctgacctcctgatctgcccgcttcggcctcccaaagtgctggcattacaggcgtgagccaccgcgcccggccgggaggaagaaatattaagggaacatctagtatgtgctagatattttcctattttctttctcatctagctgcaagatcatatgataacatgagacagcagagaggagaagacccctgtctcacagccagtaagtggtagggctgaggtttgaactcgggtttctccaactccaaagcctgggctctttccttcatgcagtctccacacaagaacttgcacaggtgctcaagggtgctgaggaggagtgtttggttgaagatgcaagaagagagagagattaaatgggagtgggcttagatgagggaggaagaagatgatggggaaggaaggtggcagacggactgagtgatggagaagggaggtgggggagggaagggtcacagggttctgctttgacagggatttgggatcccaagaatggagctttttttccacactgtgccttgctggaatcacctcacgtccccacatgcgatgagctcatccttctcttggcaccacctgcctctcatcttggccctggctgggacgcaccaacgtttctgcaggaggaataaagcaataacaggaatctcatttttctccttaaaataatatctctctgttctgccagcaagcagggagctactcctgccagcactccagtgggaagcctgttcccaatccgataggattagtctgatactggcttcccaggagcccccagtagccaaggcagccctcaggtgaccttgagctcctggctacagatcccctgatgtccttctcagcccccagatagtcactcacctccatgcctccatcccaggctctccagggcaaagggatgctattctcactagtcccaggctcccctagctggtagctccttcaccatctctctaggacctaaccaatttcctacaaggaaaggatcactggaaaaaccattttgaacaggaagaatttaatttttttgcaacaggctttcccctctttaaagaaaagaaagaaaaaagagtcctcatttacctaaaggtctgagtgcctggaaatttcttccctgtgtgcacattacccacttcctggctgcagggatggaaggactcggagaattcgaaggatattaaacagattcataatggactcagcagtataaacatgtctcaagtgcagacagaaatgccacaagctcctacttggtttaatgaaaacatacaccagttgtgtctgtgttcccattttacaaataaacaaggtggggagatggactcggaaattgtccctggggagccaggtgcctctgttcattgcaatttcaatggcttctcctgcccacaaacaactcggaaaagaacgcttaatgtagccttgcagatcagtgccaaaaggcacagcaaatgggagacgcctggccaaatggtccgcagccattcctgttctttgtggtgatgctccgcgtggctgggggctcaggggccccgaagacggtgttaccaaccgaacagctccaggcagcaggatgtacacaggacggtgcattgggaggcctgggttcaaatccagcttctgttcccactgccagcaggctatgccatcccaggcacctgactccacccctctgcctccagccaggtttgcctcatctgtgaaacggggtaacaatcccagacctgtgtcgccgcatgatcgcaagggctctctgagacaaggtgggccaatgtcctgggttaagatgtaaatgacttcaggaatggccatttttctcattttaattcaaaatcagtatttcctattactggttctttcaaatctagagctggagggactgtgtcacagtcagaaagtctaaacaagtcgaggcaggatcattgactcaaaggccagcatgactaatttggccccatagctagttagttcggtgctaggaacatccaccaaaccagtgagctggctgggttgacccgtgggtttggtcaaaacggctgcctggttgttccagcaggggcacggcccacatctggacagggaaggaagatagatgtggacattggagccagcatgcctgggtgttgctgtgtgacatgaggcaaattcttgaaccctcctgtgtcctgggctcctcatttgccaaatagggactaatagaaggccctcaaaggagacttggaggatgaaatggtggagttgtgtgaagcgccctggacagtaccagcccccagcaagtgctctgcaagtgttaggtaatatttgtgtcaggggaactctaggcattaacagcaagatgtttctaaagaataaaagaaattctcagataaggaaaccgaggctcctaagtggggcacgatttgaggaagttcacacaagttcaactcgcattcaactgacattttccaggcaccgtgatcatagtaatcatcgcatggttaacattcagggatccctttctccattccaggaagagtgcaaaaaatatcttgtgctttaaagaatcaaattctcacctctactctgtagggaaaacaccattatgcccattttacagttaaggatattgaggcccagagagggaaaggacttttcctgacctcaggcagctggtagctgggattagcccatttttcttccccagaatgctcgctacctctttggctaggcttgggcacctggttctttattcttggcccagactccagtgctccctgcttcactccctgtggcttcttcctctgtacttcaggcttcccagggcctgggtgtgcagtctcacccagcgtggggacatgggacaggacaactttgagctcagcctggggcctggatctgtgtccaggtgggcgtcactgtgtctcccctaatctccttgtccagcactacatttttcattgtgcttggtgagtgcttgcagcatttttcccccgcaggtttttggccatgctcatgtccaaggctctaaggattctctgttctcagataataaataacaagtttctaagtcttccagagaggtgggaagggagatgctcagcagctccaaggcctgaagaggccttggacctaacccaagagttcctggcatcctggttcatctgtccccaaagatacctactttcccacctctctggctggtgtgtacattatccccaaattcttcccaaggaaaataaaaaacaagagtggagaatcagagagagagagagaggggaaaaaaataccaaacccttgggaagagaataattattcctcttactcatcatcactttatagtgtagagcagaacctactgtcctagaccaggcaagagaggcccctggcctgagtcttcactttatagctgctcttgcttttgccagccacgcccctctccatggggtgaggagtccacagggaagggatgtgcccgtctggagccagcacccgctgatacaccgtgctgggtgtgcctggaccctggaatgtcctgccccaatggccctgaacccacttccaggatctgcatgggcttcttcctggaatccatcttccccaggcccccgccaccccacccccagtgtgtgcacctctgggctgaggggtgtgtgtgtgtgtgtgtgtgtgtgttagacattagggctaaggcatcctcatgcatctgcctgaagcccttgctgtgcaggacggagctggcaggaggaagggaagggagaatgggccatgagtaagggccaaaggctggcttctccccatgctggggtgttctacattgaattccaaagagtccagggactccaaattcaaacctggccttccagggtgttatgacagaatatttgtgagagttggaggataaaacatttcatttacgagtttactaaagttgatttttttttagctctttaagtatttagacatatgtagctgaacttcatctacactcttgccccaggccctgcaattgttaggagttggtctggtttccacatcccttttcatctccctacagacacatctccttcagtcaccatagctgggtataatcacttgcacttacaaacgaagaaggctctgaggctccgggaggttaagaacttgcctgacttggccgggctcagtggctcacgcctgtaatcccagcactttgggaagctgaggcgggtggatcacgaggtcaggagattgagaccacagtgaaaccctgtctctactaaaaatacaaaaaattagctgggtgtggtggtgggcgcctgtagtcccagctactcgggaggctgaggcaggagaatggcgtgaacccgggaggcagagcttacagtgagctgagattgcgccaccgcactccagcctgggcgacagagcgagactccatctcaaaaaaaaaaagaacttgcctgactttgcataggtgggaagtggcataaactggacccaaaaccaaaccccccaaccccacatctggttcttcccactcccctgaccacccccatgccctgccttggagactctttcccctctaggaggtggtacctttctcctctgtgggtgcccaggctgagtggtcagtcaagtggaagaggcacatgcaggcttgggggcggatataataaaacagactcactccagcatggggggagagcaacaaggctcttgtttctcttccttctaagtaggtgctcttcccctgtcttaattgggggcaaccgagaagagcacctacttagaagaaagaaaaacgacagcctgttgctcctcagattggtgattcctgatagctcctgtttcaaaaccataacctcatcaggccccgcttcccaaagctcccctctcccaacaaacagagttttccattgtagagaagggaagaaatgcggctctaatccccttcgttccatgatttcatctccttctctctctcttccctggggactccaggcaatcacgtggaggagggaaggtggggcggggaggggagccaacactgtcttcgcatgatctggggggtcatccagggctttgggcagaaataggggagctggaaggtataatccatcccctccctagcagccaagagagctggaaaactgggagtcttccatgaggccaccctcccttaacctccccactggcccacatgccactgatttcacctccttgactctgtccccagtcatgtatcatgagtacatgtgtcatggatcctcttgctgcctgagcgcagacctcatcatttctcactgaattttgcaacagctgcctcagtgggcctctcagactccagtgctgtctgccttgggcctgtcctccacccagctgtccctgtgattctccaggtcatgccccaggagctctgcagcaccagcagggtgaagcccacactccaaatggtgcccaaggccctgcctgtcctctccccaccttctctccaactcagtcatcacaatctcctcttgctgctttcttttttttttgaaacaggttctcactttgtcacccaggctggagtgcagtggtacgatcatggcttactacagcctcaacctccacatggaaggttcaagcaatcctccatcctcatcctcccacatagctgggattacaggtgcaggccaccactcctggctaatttttaaaattttttgtagaaatggagttttgcaatattgcccaggctggtcttaaactcctgggctcaagtgatccacccaccttggcctcccaaagtgctggaattacaggcatgagccaccgtgcctggccttccttttggcattttatgatccgtaactccagattccataaggtgctgttctggtctctacaaggctgctcctgttgctttccctcctccaggaagcctccatacacacatgcacacacacacacacacacacacacacacacacacacacacacacacacgtatgcacaggcgggaccaccacttctccttggggcttctgtagagtcctctgtgcttctctctctctcgtgtgcactgaccacgttttcctccaatcatcctcttgtctcttacccactaaactccttgagggatacatggtttctgcatttttgcatttttgctttcccaggtcctaccaaagctcttggccgatcagccttaccccatgctcccacacacttaagggaagcaggcagactctctgctcttaaccctgtgcttcctatccacacctcccagcctatcctgctgcctggcacgaccccactgcagagcccttcatttcttccatctaaagatgaccctgaccctaccccttccccggccccacctctttctgccccgtgctgcctagggcctcctccagcccgctgcccgcccaccctgggctctgctgacacagggctgctgtgtgttttacagacttgcagcccttgtttgaggtaatacagagtttccaggaaagagccacatagaattgaatatcatatttacatatatttttttaatttttaaattttttttttttttgagacaaggtctcactttgtcacccaggctggagtgcagtggcacgatcttggctcactgcagcttctagctcctgggctcaagcgatcctcccgcctcagttcccaagtagctgggactacaggcgcatgctaccacacccagctaattatttttttttgtatttttcgtagagatggggtttcaccatgttatctaggctggtctcgatctcctgagttcaagcgacccaccagcctcagcctcccaaactgttggaattacaggcatgagccaccacgcccggcctgaataccatctattgttagatcgagagtcaacaaactctttctggaaagggccaaatagtaaatattttaggctttgtgggccaagagcaaaattaagacttatataacaacagagaaaacacattttcacaaaccttttattaacaattcaaaacaataataataatagaaagagagttattttggggaaatgacatttggcttaactgaggttcaaagttggtgttccttctcatcaaattgcttgcaaatgttcatctgtaaaaaccattcttagctcacagaccctacagaaacaggtgtgggttggatttggctggtgaaccatagtttgctgagtttcatagtctcttcagccatccccagcctctctaaccctccagtgctggccctggcctttcctctcattgcctctccagacttttcctctcatctgctgtccacctgtcctctcactccaccccaaggcttccccgcagactctaggagaactgtttttttgttttgttttgttttttgaataccgagtatttaaatcctgttaggctaaatttttcctatcttggccagcagtcagcaagctgcagtttgtgagccaaatcttagtctcctatctgtgtacatttggtgagcttagaatctttttttttttttttttgagacagagttttgctcttgttgcccaggctggagtgcagtggcacaatctctgcctcccgggttcaagcaattctcctgcctcagcctcctgagtagctgggattacaggcatgtgccaccactcccagctaattttgtatttttagtagagacggtttctccatgttggtcaggctgatctgaaactcctgacctcaggtgatccacctgccttggcctcccaaagtgctgggattacaggcatgagccaccgcacccgaccttctttttggtcttttatttatttatttatttatttgagatggagtttcgctcttttgcccagactggagtgcagtggcgtgatctcggctcactgcaacttctgcctgccaggttcgagcaattctcctgcctcagcctcagaagtagttgggattataggcaccgcccccacactatgcctggctaatttttttttttgagatggagtctcgctctgtcacccaggctggagtgcagtggcgcaatctcggctcactgcaacctccacctcctgggttcaagtgattctcctacctcagcctcctgagtagctgggactacaggcacatgccaccatacctggctaatttttttttttttttttttttttttttgtatttttagtagagacgaggcttcaccatactaagccaggatggtcttaaactcctgaccttgtgatcctcctgcgtcagcctcccaaagtactgggattacaggcatgagccacagtaatttttgtatttttagtagagacagggtttaaccatgttggccaggctggtctcgaactcctggcctcaggtgttcttatctcagattgggctaggtcctgggtggggttagggaggacagaggaggaagcttttctttcctagcctaatagacccattagtaaggcatttctcacctgtgagccagtggttcttccacccattccagggagctcggctctaatgctgtacctgggcctcattgccagagagtctggtttagatgggtccccagagcacattaagcactgtcctctgccaaggtgctcagactgcagctcctgtcatggggacaaggatatcttcttcctgttccagagtcagtgaccttgtggtgtgacagatgccacggggccacatgtgtgcagtggagtgggagcccagaggaggggtaccaagtggttctgaaggagtcctgtgtgagcatcaccaggaagtgggggtttctgaagtgacccatccggtttccagaatgaatttgtcagaggtaaggaccagagatgtccagagtttcctgtgagtctgcacccaggcaggtgaaggtggtaaaaagattctgatcagatgctagcagcctggctgggcgctgacctggaaagcactttgtcaatcctgtgggccatggatgtgagggtgagagattgcacctgcttgagtctctggcagaaaggctgccttcctctatactctcaggggagaggggctagcgtttctgagggccacatagagccagactgacccttcaggggcaattctcctccttctttttattatgaaaaatgtcaaatgtacagaaaagcagaaagatgagtacgccatatacccacaacttagacccaacaagaggcgacattttgccattcacttctctctctctgtctttaaaatcatgtattaagctgggcacagtggctcatgcctataatcccagcactttgggaggctgaggtgggcgtatcacttgagctcaggagtttgagaacagcctggccaacatggcaaaaccctgaccctactaaaaatacaaaaattagccgggcatggtggctcacgcctgtaatcccagctacttgggagactgaggcaggaaaattgcttgaacccaggaggtggagattgcagtgagctgagatcatgctactacactccagcctgggtgacagagtgagactctgtctcaaaataaataaataaaataaaataaaacaatatattaaagttggttctcttttcttttggcatacagttctatgaattttaactcatgtattgatttgcagaaccacaccataatcaggattcagaacagttccatcgctgcccaaacaactccctggtgctacctctttatagacatgccctgctctcattggtcactcctggcagccactgatctgttcaccatccctacagttccccactcacacccctttttttgatacagggtctcattctgtcacccagactggagtgtagtggcacaatcatggctcgctgcagcctcgactatcatggctcaccacagcctcgacttccccatctcaggtgatcctctcacctcagcctcccaattagctgggattacaggtgcacaccaccatgccccaccaatttttttgtagagatgaggtttcaccattttccccaggctggtctcaaacttcttggctcaagcgatccactaccttggcttcccacagtcttgggattacaggcgtgagccaccgtgcccagccagttttctcttttggagagtgtcatataaatggaaccatacagtatgtaaacttttaacattggctccttttactcagcatgatacccttgccctttatccaagtgattgtttggatcaatagccttttcctttttgttgccaagtatatttcattatatggatgtaccacagtttctttgttcattcacctcctgaaggacatttgggttgtttccagtttttgataactatgaatagagttgttataaacatttgtgtacaggttttcacatgaacataagatttcagttctctaggttagaaacccaagcatgcaattgctggttcatatggtgtgtgagtgtttataagaaattgccaaatcatttcaaccatttcaaaaaattacagacaccatgacatgtccctcctaaatgtttggacatacatttccaagcacgagaatttctctcctcaaatcacaatgctattatcataagctaacaagggtctctgaaacctatttaaaaacaaaaggccgggtgtggtggcttggctgggtgcagtggctcacgcctgtaatcccagcactttgggaggctgaggtgggtggatcacctgaggtcaggagttcgagaccagcctggccaacacggcgaaaccccatctctactaaaaatacaaaaattagctgggcatggtggcgcacacctataatctgagctacttaggaggctgaggcaggaggcaggagaattgcttgaacctgggaggcagaggttgcagtgagctgagattgcaccattgtactccagcctgggcaacaagagcaaaattcggtcaaaaaaaaaaaacaaaaaaaaaccatggaattataatttagcaaagtttcagggtacaatatcaggaaaaatcagttgtgtttctatactccagcaatgggtagtcataaatttaacccaggagatgaaaaacatgtacattgaaaactgcagtacattgctgaaagaaattaaagacgtaattaaatggaaagacatctcatgttcatggattgggagacttaatattaacttaatattgttaagacggcaatacttctcaaaatgatctactaactcatgatgattatttttagttgtcaacttgactggattaaaggacacccagatagctcataaagcattatttctgggcatgtttgtgttggtgtctctgcaagagaatggcatttgaattaagtggattgagtaagcaacatctgccctcacctaatgtgggtaggcactatccaattggctaatgacccagatagaacaaaaaagcaaaggaaaggtgaattagctttctctcttctggagctgggacaccctttttctcctgcccttggacatcagaactccagattcttaggctttttggctttcctggttctgaggccttcagacttggactcagtcatgctactgagctccttggttttgcagtttgcagatggcgtattctcagcctctgttaactatatgagccacttctcctaataaatcccctttcatccatatcgcactctctctctctcttctatttattatctatctctggagaacctgagtaatacaagattcattgtagtctctatcaatattccaatttttttttgtagaaatgcaaaattccattctcaaattcatatggaattgcaatgggcctgaatagtcaaaacaatattgaaaaagagaaagttaaaagacttacacttggccgagcacagtggctctcacctgtaatcccagcactttgggaggccaaagcaggtggattacctgaggtcaggagtttgagacaagcctggccaacatggtgaaaccccatctgtactaaaaatacaaaaattagccggacatggtggcacgcacctgtagtcccagctactcgggaggctgaggcaggagaattgcttgaacttgggaggcggaggttgcagtgagctgagattgtgccattgcactccagcctgggcaacaagagcaaaattctgtctcaaaaaaaaaaaaaacacaacaacaacaacaacaacccacaatgaaataccacttcacacccactaggatggctataatttaaaacaatggaaaatggcaaaagttggcaaggctaggaagaaataagaacattcatatgttgcaggtaggaatgtaaatgtagcagctgctttggaaaacattttgatggttcctcaaaaagttaaacatagacttagcatgtgacccaacaattcctcttctaggcatatacccaagagaaatgaaaacatgcccatacagaaacttgtacacaaatgcttatagcagcattattcatattagacaaaaggtggaaacaactcaaatgtgcattaatgaatgaatagataaacaaactgtggtatacaaatgcaatggaatattattttgccacaaaatggaatgaagtatcagaacatgctcaaatggatgaacctcagaaacatgctaagcgaaagaagccaagtacaaaaggtcacacattttatgattccttttatatgaatatttagaataggcaaatctataaagataagaaacagattagtgattgccagagggttggggaagggagtattgggtgtgattattgaaatagtatgggattttttttttttgaagtagagacaggatctcactctgtcacctaggctggagtgcagtgacgcaatcatagctcactgcagcctccacctcctgggctcaagtgaacctcccacctcaacctccaaagaagccgagaccacaggtgcatgccaccatgatcagctaatttatttttattttttatagagatgggggtctcactatgttgcctaggttggtctcaaacacatgggctcaagtgatcctcgtcccttggcctcccagagtgttgagattacaggcttgagccactgtgcccagccttttattttcttgactttaactttttcaagagactgagccagtcattctctaggaattgtctattgtttcctcatcttgtttagctcgctccccattctctgcccttgtaaactggaagttagagctaaagacctgagttaggttccttaccacttttgtcaagcacacttctgggccatgtagggtacataaggaggcagatcacatggctacactaccatttgtgatgctaaattgatcactggattaagactgggaaagccagatttttccatgggcaatgtacttttttttttctttttttatttttttttttgagacggagtctcactctgtcaccgaggctggagtgcaatggtgtggtcttggctcactgcaacctccgcctcccaggttcaagcaattctcctgcctcagcctcccaaggagctgggactacagatgcatgtcgccacacccgactaatatttgtatttttagtggagacggggtttcattatgttggccaggctggtctcaaactcctgacctcgtgatctgcccacctcagcctcccaaagtgctgggattacagggcatgagccaccatgcccagccagcaatgttcttttttaccctttgctgctgaccaaccatctagggtgaaactggcagcataggcgaatatctagtttccctgaagaatcctctttgagtctccccaacacccctgccatgtaaattattatatctcattttatgaataaagaaactggttgggcgcggtggctcacgcctgtaatctcagcactttgggaggctgaggcgggtagatcacctgaggctaggagttcaggatcagcttgggcaacatggtgaagccccatctctactgaaaatacaaaaaattagctgggcatggtggctcatgcctgtaatcccagctacttaggaggctgaagcatgagaatcacttgaacccgggaggcagaggttgcagtgagccaagatcgtgttactgcattccagcctgggtgacagagtgagaccctgtctcaaaagggggaaaaaaaaaagaaaaaaaagagaaactgagtttcagggagactcaataatttgcccaatgcatggagagataattttgagattttcacttgtattggtttccttccctttattctgcccttttgcacgttgcccaatgccagcagacggcctgatgtacttaggtaccctcacagggtggacaggttctaccttcccaaatgcaagcagctctggctggccctgcctattagcacggtcctgtgaaggctgaggacacagcttgagaccctgaggacagtggtaactggagagaaacgggcacgatgggaagaatgccccctgccccctccccccatctctcctccaccctccactacctaagcctgttgtaagcaagaggagcagaccagatctcctggaaaggagaaaaaaaaaagaaaaaggaaaaaaattctcccatctgttgagtattaacctctgaaccatttaaccaaacattggcttctcctgtcatttgataaggtgtatccagcaaagggagatgagaaaattgggaggttattcttttaaattacatcagcagggggtttgttcctgccgcagagctcggagggtcccgtctgggacatcacatcaccactagcacactcaaggacaggcttgagtgcttccctctgcctgggagttcaggcattcacagggatattaaaaaaaaaaaagaagaagaagtaagagggttttgaaaataaagtccatgcacggcaggctgtctgccctgagccagcactgtagcaaggggtgattatggaggaaggaatggtttgtgtcaccgtcacacggaaatgtccaacggcttttctgcagagacaacacctctcagtcttccagagactctctgctcagacttccggagctgtcggggacctccaaggccactccgcctgtcccagcccccctttgagttgggtttctcggcaggatgggccagcgagcagtctagacagatagagaccttcagtgctggccagctggcttctgctggcaggtcggacccgtcgtgaggacatcaagccctggacagagggcaggagcccagactttggctgctgtctttggtctagccctccctcctgtccctcttctgaactccaactgataagagcagcttatctccctaggcttaggtccttgctgaactagtcccttctctctgggcctcagtttccccatgagtgcaaggagctggatgggagggtctccaagggcctatcaactctgctacatagtggtgtttgatcttaagattcctttggccgggcacggtggctcacacatgtaatcccagcactttgggaggctgaggcaggcagattgcctgaggtcagaagtttgagaccagcctggacaacatggtgataccccatctctactaaaaatacaaaaattagctaggtgtggtggtgggcaccggtaatcccagctactttggaggctgaggcaggagaattgcttgaacccaggaggcggaggttgcagtgagccgagattgtgccactgcactccagcctgggtgacagagtgagactctgtctcaaaaaaaaaaaaaaaaaaaaaaaggctgggcgcggtggctcatgcctgtaatcccagcactttgggaggccgaagtgggtggatcaggaggtcaggagatcaacaccatcctggctaacatggtgaaaccctgtctctaataaaaaatacaaaaaattagccgggcgtggtggcgggctcctgtacttggaaggctgaggcaggagaatggtgtgaacccgggaggctgaggttgccgtgagtcgagatcgcgccactgcactccagcctgggtgacagaggaagactccatctcaaaaaaaaaaaaaaattctctggtggggggaaacacctattctctacctttcctagtgactcacagcccatttgttgaaagtcttccctgccatcttttctagcctcatttcactgaaacttcactccttttttttttttaagtggagtcttgctctgtcacccaggctggagtgcagtggagcaatattggctcactgcatgcttggcctcccaggttcacgccattctcctgcctcagcccagccgaaacttcactccttttatctggtccttggtttccagagccagtgaggtcttgcctacctcttcccctggactcactaatctatctctcatatatcacttcttccccagtaaaggcaagggaaaggcagcccactctccctgttcactaactgagctccaggttcggggctgggctcttccatgtgtgttagcttatttaaacttcacaacagctcagagccatggatgaagtcccacttcaggtgaggaaagtgaggctcagaaacaacggcttggccaggcttccacactaggaagaggaggagctgggattcagagaagatctgtttgagcctaaaggccagattctttccaccatatcatataataccttccctgagtcccttagtcattggggctcttcctgagcaagattccttcctggaagagactccaggcatcttgaggacaggggaggaagaacagcagagaggcaaagcatggaatcttgttccaaagacctaaccctccttgggcagacaagggaagagaaagggaagtactcaaggctcagaaactggtcaggacatggcaataataaacttgagcccagggttccactgcatgtgacttcacacctaatccatttcccatctcaagtgatgtcagggtgttgctgaccacggtggctcgccagagagggctctgtggtgacttccttccaacagctcaaatgacacaacgcaaggcacgccatttccaacacagattaggtatgtaatcttgagcaagagggggctctgagaccaccctctgttagagccttggtttcctcaactgcataatgggcataagattatctacccacctcagcaggttgtggtggacaacaacagtgaaaagactgcactagctttgatgtcaaaaacactgttttgccaggtgcagtgggtcacacctgtaattgcagcactttgggaggccaaggagggacaattgcttgagcccaggagttggagaccagcctgggcaacacagtgagaccttgtctctacaaaaaatttaaaaattagccggtgtggtggtgagcacctgtagtcacagctgtttgggaggctgacatgggaggatcgcttgagcgcaggaggttgaggctacagtgagctgtggtcgtgccactgcactctagcctggatgacagagggagatcctgtctcaaaaaaataaaaaattgttctttttcttattctctcatagtgcccatcccaagtcttacctgtagcagacacctggcagatgtttattggatgtataccagccactaacctttggaccacccttgagatcttatgagcttattgaatgtttccacacctcatcttcttcttcttcttcttctttttttttttttttttgagatggagtctcactctgttgcactcccagactggagtgcaatggcgcgatctcagctcactgcaacctccgctcccgggttcaagcaattctcctgcctcagcctcctgagtagctgagattataggtgtgcaccaccatgctcagctaatttttgtatttttagtagagatggggtttcaccatgttggccaggctggtcttgaactcctgacctcaggtgatccaccctcctcagcctcccagagtgctggattacaggtgtgagccaccgcacccggcccttatattctttagttatcccaacagcctttcagaaggcagggtttgcccttgctctcatttacagatgtggaaactgaggctgatcctttgtggcttccagcttgctgaggggttaaggtacttttcggagccctctgctgacagttctctgtcttcttgttctttggagagagcagccagctgcagcccagatgtggagacccggctggccgcaaaggagttaggtgggtgggaatagcctaccatttcctctcttgaagacaaatggttcaggggccattggaggctctgcaggctatgctgtggctggattaggagcctccgtggggcgggagatgtgctcatcctgaaaacagttcctgccttgtgaggtggccacttggaggatggaatcagcggacagggtgctcagtaatctccctccccttcgcctcacaccaccactctctgaatagctttgtttaggccctaggccccaaaggtcctcatcctggcctgtgaaaatgaagggatgctaaagagggtgccatcttggccaacattttgtttggccaggattttgagccctctcctctggccatggagtgagcagatacacacacaaactcagaaaacacccacacaacgcacacacctacaggctcatagatgtgtgcacacacaggtacacacacacgcacatacacatgtgtacacatatgtgcgtacattcacacctccaaggagcagccatgagcttccccaggctctcagagctgcgttaagcccctcaggagaggaggaaaggaagctgcgtgtcatatatcatttctctccaaacaggcagtgtcctctctgcccaaagcaggggtgggggtggtcggcggccatgaactggtctctggaaggagcccctctggcccatatttcacagacaccccagacggagcctgctgtcaggagcgctgtctaatttcctcccgactgccggcccggatccccccaacaaagaggggcattgtgtcctgcccccacccctggcatctgctccacagagatccggcaggggatgcacagaggggatttgtgggatgaaggccccgcatcctgtgccacagcccccagaagggccacagattcttgagtagaaagagcctggtcctgactgaggggtccccccaggctcatgggcctcggccactccagtgtccccaccagcagtcttctcgagtaatagcttctcctcatgcctgtcagggaagaggtgtgtgaacgggagcagctgaggatgaaagggcatttgaaggggcccaggcctcccccaccctctcttagaagaaacacagccttcagcacttggtaccggcttctggagggggacttgcctgcttggcaggcctgcagggcacctcgctgtggagaagagacagttgtgcctggtttttctgtactctagatctttcacgggctggtcatgttgggaaggaaaagtggggtcctagggggcagagccatggcaagacaggatgaagggagggtggacgggtcaagcttaacaatgggctgagcgccctagggacttcctggggccttcactttctggttccttcctgaagaggctgctcctccccagctgcccctgggtgaagatctgagcgatgcctcccatggagggggtgtgggtgtgaggggattgacatagtggctgaatcggtattgtaagatgtgcttaggggctgtcatgtgtggccacagtgtgaaaagttctgttctgggttaacgcatcagaagcaaatctggatctggcatcctccaagcccttgactttccccacgatcccctactgcctctcagcagcacttcttttttggtatagcttggcgctttgaaaacgttttgcccatagtatctgtttaacctttgtactcaaggcagaacaaggtattagaatgctcagttttttgcagttgggaaatcggtccagggaagatgggtggtttgctaaaagtcacgcagcaaatgagtagaaaagcaggtactgaagcctaggcctcctccgggctccatgcttgtgctgacactgtgttgcagcctccctgaagaagcggaagagcactctgactagaatctggggtgtgtgtgtgtctgtgtgtgtgtgtgtgtgagagagagagagagagagagagagagacagacagactgacagagggcactcattcccacttggagggcccactctgaggcaggcaccgtgcgaggcattctgtagaccttaccccattttcctggggacagtctgaccgtctccactcaccctacctaggacttaacacatagttagaactcaagtaatatttttgtggagtgaatgaatcaatctaatcctcctattagcctgtgagtaaaatatgatctgtactttgtaggagcatttttcaacaagtgtttatcaagcaccactacttctgcaggccactggatgaggaaactgaggctcagagaagatgaatgactccatgcaggccacacagctaatctgtggcacagcctgtgtcggaactgcaatctatcagtgtccaaagatggtgtgtgtgtgtgtgtgtgtgtgtgtgtgtgtgtacgtgggggtagggtgagagccgtgtgtgtgtgtgtgtgtgtgtgtgtatgtgtgtacgtgcgggtagggtgagagcagtggggagggaaggtgataagaaacacaggatttctcttcctgcaatgcagagaatttttttttttttaggagatggagtctcgctctgtcgcccaggctggagttcagtggcaccatctcggttctctgcaacctccacctcctgggttcaagcgattctcctgcctcagcctcctgaatagctgggactacaggcacacatcaccacgcccagctaactttttgtattttggtagaggcagggtttcactgtgttgcccaggctggtcacccacctcggcctcccaaagtgctaggattacaggcatgagccaccatgcccagccaatgcagagaatattttaaaggaaaataacctgaagatatcatggtcccaccaggcagtcagccagctcagacacaggcctgcagctctctagccaggtgcaccgggtgctttagacaggatttgtgttcctggaaaactggttttaaatcattttttaaaacacaaataaaaccatcctttacagccactggggaagcctgcagcttgctgggaggctgcagcaaggttttttttaccaggagtaattttttagagcctttggatctgtcctactggattttctcaaagcagggtaaatctgctggatggtggagaaagccaaccatgaggctctcgccaagatgagcacagactcagtggactttcatcctgggggttctcagaccctggctgagcctgttcccttcccactaacgctggattgaagcccagccgtgggccccggctctggggacaggctggagtcctgagccagcagctccggttaggaaattaataaagaaagagaagctctcgcagccaggcccacggtgagagacgagttaggtcatgtctctttctgttcaatcggatattagtcccaaccctgatgtcaccttgaagctattaagcgtcaccctcagagacgtgcgtgagtggctcacaaacctcttatcaggcacacttctgagtctcgctgttgtcagtggtcaggctctggaagctgttttttttgccaaccatgggtcaaagaggagaggtttgtccagacttcagacagagctcagagagtgggggagggatttgcagagaaccttggccccagagagttccctggggctgtagaaacagggtgactgttcagtgcccctcttcaagggcatggccggccagacctggtggtctctgaagccctgactgcatcaagccacctaaccagcttctggactgagcttctcctacactgtccacatgtccagcaatgggcagttttgaaccgagaagtcagtgatgtcaatagtttaacggttcctccatccatccatccatccatccatccatccatccatccatgtgtccactcatccaatactatctattgaacatgtattatgtgccaggcatcatgtggtagctgagaataaaatggtcagagaaacacatccctttctctttcttccagcttataaagcagaccataaatgaataagcaaacaaaaaatagaagaatgacaaattgtggtagtggccataaaggaacacacacaagttgggaagatagagaataaaggaacagtcatggccacaggtagcattagagaagggcgtggatttaagattttttttttaagacggagtctcgctctgttgcccaggctggagtgcagtcatgatctcagctcactgcaacctctgcctcccgggttcaagtgattctcatggctcagcctcccaagtagctgggaatacagatatgtgccaccacgcccagctaatttttgtatttttagtagagacggggtttcaccgtgttggccagactgctctcgaactcccaacctcaggtgatctgcctgcctcggcctttcaaagtactgggattacatgtgtgagccaccgcgcccagccggatttgagatatttttcaaagtgtttcaaaaatattcaggtagccagggttggcagcaaataggactgagaaggggcagccggtgagagaaggaacatggtgagagcccagcaccacgatggccaagagatgacatgactgaccagtgcctcactggtgttgtgagggattagcaggcacaggctcctctgtctgggcagagaatatatagctcttaagggcaatcatttccacccaatggaaggaaagaaagccacccaccatgggcttacccagttactggaaatgtggttctttgggggtctggacagaaaagagtagatctctccctgacactgattctcatctttgaatagaagaactatcagaaatgcacgcatccatctcaggacctggcgcaggcaggtgagcagatttctgaaggcctgagcccctctaggccttttcctttggaaatggattccctactcgcttgcttcatctctctcttttttcatatctcctcacctctctcagcaggtcagccacacactcgctcgtccctgatgctctctcaaggatggagaaaaccattactgaaaagttactgtctgggaattctcagttgtttggattcctaccaagccaccatctctggtcacactcactggttcccatcaaggagttgccagtgggtggccttgcttccttcatgcagctttgccctcgggagaaagtggaggatttttaccaacttgaggaacagctggtcccagctactgctcacccagtgcaggtcaatcaaacaccaacgctgaagagggagaggagtgcatggaatgttcaaaagaaaccagaaacctcttgattgctgtgtgcatgtacttttaatttcatgatcaaactctcctcagtgggcttattaactgggtttattggggaaaggaaaattctcacactgaggtttttttctgatggttttagaaattggtgaatgttgctgcctcgtgttaggcattgatctactattgaaaattagtttgggctgggtgcagtgactcatgcctgtaaccccagggccttgggaggtgaggcaggaggatcccttgaggccagaagttcaagaccagcctgggcaacatagtgagacccccatctctacaaagccatttaaaaattagctgggcatggtggctcacacctttagtcccagctagctactcaggaggctgaggtgggaggattgcttgaggctaggagtttgaggctgcagtgagccatgatcacaccactgcactccagcttgggaaacgaagtctcttaaaaaacaaaacaaaacaaaaaaaaaacttgggccatatttatatttaaacttcctgcgtgttcctttagagtgctcctagaatccataagtccttggggctccaggtgtgggagagcactccagacagaagggaatgagccaaggaatggagaaatcacatggcctatggctgtggaatggaaggtggcttggtcttgctagagcccaggatttgtggcggaggtggtaggttgcggctgtggaggtggtcaggggctggatcatggagacctgtgaaggctctttattttgtaggtgaggaaagctaccgataggttttaaattgggggtgacagggttgaatttttttttgtgatcactctacaggctgagaggggatgggatttgagcagcctcagatcaggagggagagctctcagaggctctaattcaagtgagacatcagcagccagaaggaaggcagtggtggtgggaagacaatgccgtgggtgggagaagtatctatgtgggaagtaaaatgagcaggcccaggtagtggattggttcggaaaagcagaggtctgtatgacgatgtgccccaggtttccagtgtgaatgaacaggtaggttgtggtgttgccagctaaagtagaagaatcagaatgcaggcagtggtgctcacccaactgcgggaatggcgatttccccttcagatatcggagtttgagatgcttatagtcatcctaggtggcaaagggcagtaggcagcagaatagaaaagcttaggcacccagatcaggcataggaagtgttggcctggggccagaatgcgtcaattccaaacccagcttcatcactggagtggtcagttttcacgagctcgtgacccacaaatcccagtggcttacagcaacaaatgtttatatcctcactgacatctgtgaaggctatggggtcagctttggctttgttccatgtttttctccttctggaacctagggatcctccatttcagcctcgtacagagggaaaagagcaggagtacagccgtgtgatgacccgtaaagcttctgcttggatacagcacatatccttctgctcacattctattggccaaagcaggccacaaggacaagctgatgtcaattaggtgaggaagtgtgcccttaccgcggcaggtgcatcatatggcaatgatcagggaggcatgttccccagtggagagggaagaagataaccaggcccaataatacaatccaccccaaacactaaccaccataaaaccttgggagtttactcagcttctctccgccttggttacctcatgtgtgaaatgggaatgacggtagtactacctcttaggatggctaagagaattcacttagtttgtacatgtaaagcggaacagtgctcaatatggcgcaaacactatgtaaatgcaggtgaatgaaggggaggggataggggttagtgttccataggcaaagggtctcagtttgggaagatgaaaacgttctggagatggatagtggcaatggctgcacaacaatgagaaaatgtttaatgccacgggaccgtgcacttcaaaacggttaaaatgataacttttattttatgttagagtattttacaacaatttaaaaaaacataggccgggcgtggtggctcatgcctgtaatcccagcgctttgggaggctgaggcgggaggatcacctgaggtcaggagtttgagaccaacctggccaacatggtgaaaccccatctctactaaaaatacaaaaattagccatatcccagctactcaggaggctgaggcaggagaatcgcttgaacccgggaggcagagtttgtggtgagccaagatcacgccactgcactccagcctgggcgacagagcgagactgtcccaaaaaacaaacaaacaaaaaaagtaggtggatgggatcatctggggagagattgaaaaatagggaaggtggcggaagaaagagaaaaccttgagaaccagctgtgagagcagaagcatcgagaaaggggcttgcatgggggacagagaaggaacatctaggacagatgaggaaagccagaagagggtgatgtcccctgaagccacagagttgagtttccagcaggagggtggacgggggtgactgagcgtgtccatgttgcttggctgtgaacctgaacctgagccactgaacccacttccatttggcaccttcattttggtgggtctgcctgattccaggtcctggtgatgtcacttccaggcactgcccacacctggcccaggctgcctcattgcaagatcctggccaggtctcccctcctgcctccctctctcccctcaccgtagccagtcctgttttgtccattgttgacatcttggtgagacaaattgttttttagttaaaaagacatagaggccaggcgtggtggctcaggcctgtaacctcagctctttgggaggccaaagcgggtggatcacctgaggtcaggagctggagaccagcctggccaacatggagaaaccccatctctactaaaaatacaaaaattagctgggcgtggtggcacatggccgtaatcccagctactcaggaggctgaggcaggagaacccaagaggtggaggttgcagtgagccaagacattgctctccagcctgggcaacaagagcgaaactctgtctcaaaaaaaaaaaaaaaaaaaagacaaaatatgggatattttttcttatgtcattttttactactattaatatacatttttctaccttgaaaaataaaatctccaaactttgaatttaaacattagggatggttactttgtggtcaagattcctttattaacaaaagagttcatcttttgtttataaaacattgactatttgataggtcatagtttagggaaactgaaagctaaacttttacaatgagaaatgaagaccatgcatttgcattggagaaaaatttttttttggcaccaattatattttgtacccaccttttgaaaaactaaagggggacagctctgtctagatcatttcttccctttttctcttgcttctagacattgtctggtcaatcagaaggttgcacacaagagctgtggttgttcgctctgcaaagaaaaaggcctgggaactttgctttttattgattttatttctccgagagttttcttacaaagtgaattgagctcgcacaattagcttgatgtaatcttaagaaaatatatgaagtatgctttagaaaaaatcatgctctaaccagccatctcatttggcaatcattttccacagctcttgccctttttggggtggggaggtggggttatttttacatgtgaatgattacatctgcgtacaagagatccaaactcacgttgacctccctctgcaacaccagctggtgttgggagacagagcgctgaggcagccagggcttcagtcccccatgctctttggccatcagtcctcaaatgtcatctccagaagacctggctgaggtctgggcagtccacacacaaaaacctagcatttcctcccacaataacagcatttgtagaacacacagcaagagcttaaatccatcccatggaggaagagggattttcttgtccccttttgcagtcacaggacactgtcactggagaaccttccactccagggttccacatctccaggccctcacccagcagccctccttattatctcccctcccctccagaatgcaggggacactttccagcctctacgttgttttcagctcctagttgttcagcccaacaactcagcatctggacaggttttcaatccagaaatcgtggatttaaaaggagtagctgctccttttctctggagcacagcccaacagcccctgctgtatccctaaattgattttgattttgaagcagcaggtgctgtcatgggttcattcttgtccacccagtcaagcctgtgtggacgggcctatatggggacaccgaaacctacatcgggctatttttctgtcttctctagtcagttctcagaagtgtctccacttagccaacaaatttggagacagggatgtgtttctggcttgcagcagctgagttgctgtccttgactctcctcattctgatttttcttggggtttcgggacaactaaggggccccaaagcctcagatgtgcagcctacagaggaaggtgggcaagggcgtgtgtctctgtcatttccttccttttgaagcatttactttccgagtcgccagctggttccaaagctcctctcccaccaggccaggtggtgtccagaccaggaggaggcctggctgacctaggagaacagcggtaggaggaggcatgggtggcagccaagagacgctgagaagcagtatctctgaagctgtttccagattcatccggcccggtaggatctctgtctgattccatgagagtgtgggagcaaaggccctagggaagaggctgctaagaggctggacagaacttcctagaaaatcctaagactcccaggaatgctgggcagtttcatatccaagagtcagggaaagatgtggagaggctgccctggctggggaaggaagagggtgaaggtgggattggggtgggggtagttgggtagggggctcagtccttagtcatttttcctccatgcagaatctcactctgaacttggagaggctgtggagtccccatcctcagggtcctgcccattgggggagatgggctgacctcccttcacacgcttccacttcatccttcggttctggaaccacactttgacctgggggaggaagcaaaggagcctggtcactccagggccggtgtgacctcctccccatgtcaatgcttaggctagccagggtgtaactccagggaccccagcttgaaaccatcacttaccactccctactccctcaaaggccccaggaactaggaccgaagagaggacataccaatctgcccagaggtctgtcttgtggcttcggataaagccccagacgggggaacatgttctaaaagcactctgcattggccccacccccttcacatgccctgccctgcctgtgccaggtccccctgccccctacctccattccccaagggtctgggagcagaggtcatcagccttatccttaggcacatttatagagcactttttggtttagatagctctggtaagcacattttctcatctgagcttgagtattacctgcaggattatgatcccattttacagatggagacccagaggtcccagggctaggaaaagtgatagaggcaggatttgaatctaagtcttctgattcaatatccagccctctggcagagtgctctgtcaactgaaatctgctatcaaatattacggttattattactattattccgtatcagagcatgggtgtgggggtgtggggtggctgaagggaaagtccaaaacaaagggccagggaagtttttctcaaagtgtgcccaggaaccagctgcatatccagatcacctggagaatgtactagaaatacagattctcaggcccactcattatggtaaaatctctctccggacctccagaatccacattttgaacaagtgccttgggggattccaacatatactcaaatttgggaatagccagaccgtaggtcccaacctagctgcatgtgagaatcacctagggggcctttgaaaaattctgaggcctgtatcccatcctaggccaattaaaatcatccctaggggtggagcccagacatcagcactattaaaatctccccaggggccgggcgcagtggctcacgcctgtaatcccagcactttgggaggccgaggcgggcggatcacctgaggtcaggagtttgagaccatcctggccaacatggtgaaaccccgcctctactaaaaaaaaaaacaaaaattagccgggcgtggtggcgcacgccagtagcccagctacttgggaggctaaggcaggagaattgcttgaacccaggaggtggaggttacagtaagatcgcgccactgcactccagcctgggcgacagaacgagactccgtctcaaaaaacaaaaaacaaaaaaacccaaaactccccaggctattctcaggtgtggccacagttgaaaaccgctggactggctggaggaagaaaaaggagaaggtccagggaggggtggtgggaaaggagggaagggagggagatgagagagcaaagaagaggaggggcccaccgggggcgcacctggcgctcagagaggtccaggtttaccgcaatctcatatctgcggagccgagtcaggtagttatgatgggcaaactctgcctccagctctcgcagctgctccttggtgaaggccgtcctctccttgcgggctttgctgctgccctccggcttccctctgttctcctggttgtctggggagagaggaccccaaacaggaagacatgggctgagggagactccattccctttcttttgcccttgagcaactaggcagtctttaccagtctcccttatttttacaggatgctgagaaaaaagctacactgtcctttttattccttctggtgtcttacccatattagaattgggaagattttttatttttggtttccaatctcaggtacctgcctcccaccctccccccaccccaaactttcttttattcccaaagcataagaagctactcttggctgtttaatgacctctactccccagcccaccccccagcatgacattactggtggccataagcttgaggggtgagatgctctaaaacaaagcctcaaactatggtccccagatcagcagcatcagcattacctgagagcttgttacaaatgcaaatcctagcctcattccagacctactaagtcagaaactctggggatggcactcagcaatctatttttacaaaccctccagatgcgtctggtgcacagtcaagtccgctgctctaagacctcaccactcaaaggagtgcctgggtgccagcagcatcagtagcaccagggagctgttcagacctgaaggatctcaggcctgccccagacctacctacggaatcagaatctgccccagagggccaagtctggaaagccatctggagccctctgaagcaggctgcatgttagattcagcggggctcagtcataactgccaacagggtcaggggacacactctgtgccaggtgctgtacctgacatatattagcctcttattcctcaatagcccaaccaagtggttctagtattagtatcactttatggaccagaaaacgaacacagagaagttaagcaaattgcccaagtttattcagccagggggtgtgggagacaagaattaaattcaggcgatttgacacacacatactgttcaaatgaaaagtatgtaggggccaggcgcggtggctcatcccagcactttgggaggccaaggcgggcggatcacgaggtcaggagctcgagaccagcctggccaacatggcgaaacccccgtctctactaaaaatacaaaaaattagctgggcgcggtggcacgcccctgtaatcccaactacttgggaggctgaggcaggagaatcgcttgaacccaggaggcggaggctacagtgagcggagatcacgccattgcactccagcctgggcgacagagcaagactacgtcttgaaaaaaaaatttaggaagggcttacaaacggtaaagtcctgaacaaataaaaggggctgaatggttatctcttgagcagacgggtgggaggcagctctaccttcactttaatgaatggaggtggtgggtggagaggaggtgggaagaagaccacacacttacacaattaactcgcaatgcatgccacgtggccagggaatggctgcaggagcccggggctctaacatttaaaagacgtttgcttcattaattatctttttttttttttttttttttttgagatggagtctcgctctgtcgccaaggctagagtgcagtggtgcgatctcggctcactgcaagctccgcctcccgggttcacaccattctcctgcctccgcctcccgagtagctgggactacaggcgcccgccaccacgcccggcaaatttttttgtatttttagtagagacgacgtttcactgtgatagccaggatgatctcgatctcctgacctcgtgatctgcccgccttggcctcccaaagtgctgggattacaggcgtgagccactgcgcccggtccattttcctcattttatagacatggaggctgtggctccgagtgaggtgctttaccgaaacctgcggcccaacgtcctgctccctgaaagacccatctctgccttgccggcgaggagtgttggaaggagggatcttctgttttcagaggccgggtctaagctacctgggggactgggctggggaattcagaccccctagtgtaaagcagagaagccgcctatgcagtcggctaagcagccgcattgggagtgggtggcgaggcaggaaccccacattaacccggcgatccactttggagctttgagcctagctggttcccctcccagcacccccctctattgctttccactcaatccctttgtatttcagtttccccgtcctccgcctccgcgccccactgccttgggctgggcgactctctagcaggaggcgcacggtaaagtgatttgggcgcctggcccacctcgcgctgcgcgtccgtggcctccgccgggggatggaaggggagtgggtgccaccgttccgggaactcgagaaggcgggggaggggcccgatagtcccggtgcccgggtcaggggtgtcgtggcaccctggcccgggggtccgcgtccgatccgggttggccgcccgcggggcgcgcccggggagcagggcagggggccgagttcctggcgcgggctgcctgcccggcggcctctggctccaggccggagaaggcaggtccagacccctccggaagcgggagcgtgggcagcagggaaggacgcgcagccccgggccggggtccccgaggagccctccggccttggccgccgccagcgccgcgccccctcctggcagcgggccggggagggtcggtcacgagcggatgacgggcttcccggagcacagcccggcccacgggcccggagagaggcaggaaacccgggcttagacgacgggcgcggtcggggactggtttcccaatcttctcccgtcccgaggcttagtgtttcccagcccttcctttccacggttgcggggagtggatagcccagaggaccgcagaggcttgaatcctgaatctccatgctggagactttgaggaagtcacttagcctctctgggcgtcagtctcctcatcaagaaattgaggaaatttcacctacctcctagggttattggaagaccgaacgagttaatatgtgtgtgcaacatgctattaaaatctaaaagtggccaggcaaggtggctcacgcctgtaatcccagcactttgggaagctgaggcgggcggatcacctgagatcgggagttcgcgaccagcctgaccaacatggagaaacaccgtctctactaaaaatacaaacaacaacaaaaaattagctgggcgtggtggctcatgcctgtaatcccagctactcgggaggctgaggcaggagaatcgtttgaacctgggaggcggaggttgcggtgagccgagattgcgccattgctctccagcctgggcaacgagagcaaaactccgtctcaaaaaaaagaaaaatctaaaagtgctggacaaatatattctccaatttatcagctccacgagatgccattgaagggctgggatagaaacagatgcacttcttgaaggtttctgtgtgtgcccagaggcatctgcggctttaacctcaccacacagcggcctatgagtggatactgttcttaccccctttagcactcttaacatgggtttgtgtgataatttgattaatagctgtctccccagggaaacactttttctcaccctagcatctagccatagttgcttctgtacctggcacaactgacccctaccgcgcccccaaccagttctgcacataattctcctagagagaagaggaaaaagtacttgctaagtatttgctaaataatcctgttatacagaagagccagcctcagacaggcccaggaaattgcccagtgtgcctgacagcttttaggtgacagaagggagatttgaacccagatccatctgattagagccaaggctctccatatctcctggctggctggctcaggttggggcctggagctggaccatggcagctgggcttgtcaccccttccagaggtcctggggtcaccaccctgtttgctacccacatctaccctcctccaagacctgcttaggtgtgcacaggtgccccatgatgtcccccaaataacttcccccaccccagttctgcaaatagggcagctgactactgccagccaagctatgccccatccctggccacctctcctctcctgtctcttattgccctgatttagcctctggggttccagtgccgatttccagcagaggaaacaggaagaagaagtctgggttgggaactgacggtctcagctaactccctgtgtgaacctgggggcaatacctactaatggtgggtgggatggatattggctctgggagggcggttgtcccttgtcaacttcccagagtgggatcaacgttcaccactgttggaaatgatgaagggaccagaagtatgggaagcaagctatgaaagttgaagtggaagttacgctctctttgttctgcaacagtattacaaattgcaatatattcagcaagatggaaacactatgagcacttgcatgccgtttctgggagctgttcggtcaccctgctcatgggcacagttcctgtgcaccctgccacatgaaagtaactcatgctgggtggggcgcaggtggctcaggcctgtaatcccagcactttgggaggccgaggcgggcggatcataaggtcaggagatcgagaccatcctggctaacatggtgaaaccccgtctctactaaaaatacaaaaaattagccaggcgtggtggcgggcgcctgtagtcccagctactgggaaggctgaggcaggagaatggcatgaacctgggaggcggagcttgcagtgagccacgagtaccactgcactccagcctgggcaacagagaaagactctgtctcaaaaaaaaaaaaaaaaagaaaagaaaaagaaactaactcatgcttcccaagatggtctgttcccaggatagtacaactttgttagggaggcttcctctcctctgtgggcctcagtttccccatgtgtagaagtatgggattggaccggattctgtttctgccagggagctggtgtcagaattccttcctggaacataagccttgatgccctacactccctactctctcttccattgagaacccttagccttgatgaagtctgaggctcttccaacttcacgtattcttgtctcagctcctagttcctcccttcagtcagatctgaggtcttgctgtgtgctctgttccaaagccctccccagccttcccacagctcaatgatcagggctctgctgggccgtttctctctccctgccttgagctgtgtggagggaagttatatatgcagacgtgtcggaggacctgttggtgaacctgggccttagcactcataggtgagtgaggcaccgaggaagagcttttggatcttgggcaagtcctttaggttcttggagcttcaatttcctcatttgcaaagcaggaatagctacacccgctgtgcttatcaggctgagaagtaacaggagctggatagcgggcgttaacacctagcacagtgcctggcatgtcactgaagctctgttcacaagaaccatcagaaagagttctattggagattatatctgagatgactcacgggcagagttagagcactatgctccttaaggcaccacatctccagacctgtgtgaaagggttatcttttaaatgtctggcctttcagcttttttttttttttttttttttttgaggctgagtctcactttggtcacccaggctggagattggtcactgcaatggcgggatctcggctcaccgcaacctctgcctcctgggttcaagcgattctcctgcctcagcctctggagtagctgggattatgggtgcctgccgccacactaggctaatttttgtatttttagtagagatggggtttctccacgttggccaggctcgtctcgaactcctgacctcaggtgatccacctgcctcggcctcccaaagtgctgagattacaggcatgagccactgcacctggcctaggccactattgctgcagccttcagagttccacaattccaggcacaacaactagatgtgtcacatggcaatccacatcactcctgcgctgcttctctcttgggggccgcagatgcctcttccagaactgcggagggaggatgctggccctcagtgggctgcctctgtgattaggaaggagttgccccaccccagcccctgcatagccctcaccctctgctggagcagggctgtgagggaacagtcaaatgcccagagaaatgcaaacggtgtgcatgtgattgcggtttccaccatgagcttccacaccatccagggcaaattatttcatatgtagctgccacatttggcaggccttcgtaaagtgagcagacagctttatcagagctacagggaggttcagacagacccatccctgtctgaacatttctggagttctgtactctacagtccaactctgagggcaccagtttacataaattaatatccaaatcagacaggatgccaaatgcctcacattcaaatagcactgtgcagttgacaagggatttctttcctccaaagagaacttcttttaggctttcacagatactacagaatcatagaaagtagaggtgggagggacttagagatgatcaatgtcaccttttcattttataggtgagcttagagaaggtaaggaactcctgtaaggacacacggcaagttaggggcagaattgggcctagaacccagattttcttgttaggaagctctttccaccctattgggctgtctcctattttatcctcttaattattccattaggtaggtaaggtacacattagcccgttgaacatatgagcaattaagatccagagactaaatgacttgcccaaggcccctgggaccagtctagggctatagcctcatgtcacgctgccctcgggggaggatgagtatggaggctgtgcctatcttagggacattgtctgagtctgggttcagatctctctccctgggactccccagagagggaaaaagaagggaatatttggagcatgacatcagtaggtgaaaccttggcaaatcctcggaaaacggtgtctgtggcttcctgcactgtcacagcatagacactttgatgtccccgtaagctctcctactttcagcctcagaaggaggggtcaaagcccgtcgaaatagacaagactgggatggagccagcccgagactggttggatgttcacatccaggatctccctggcttcctggggttggcctgactgtctcactgagccctgccccaccccagtgtccaggcccttttcctctcctgtaggtgcctaaagagacatcggcagggctcccagcctctctggggccagggaattcaagggatatttcatgggagagaggcaggttcttctggaatgaaaatgcgtaatgctggctgggcgcggtggctcacacctgtaatcccagcactttgggaggccgaggcgggtggatcacgagatcaggagatcgagaccatcctggctaatatggtgaaaccccatctccactaaaaatacaaaaaaattagccgggtgtggtggcgggtgcctgtagtcccagctactcgggaggctgaggcaggagaatggcatgaaactgggaggccgagcttgcaggaagcctagatcgtgccactgcactccagcctgggcgacagagtgagactccgtctcagaaaaaaaagtctggtgctatagtctttgctgagagtcccaggcggggtgggttggtgagggggaagcgcagcagctttcaagaggggatggggagaggcatgggtagttctgggttttgtttataagttccatatgtcaccctcagctgtcaccaaaggaagtgtgggcttgagacccaggcccactgctcacgctgttcctgtacctctgcatgcaagaaaaacaagggggaaaaaaaaagaaaagaaaaggaagggggtgggtcctggccagaggccagggagccaaattgggtgagaagcccaagttatgggcagagagggagttggggaaaagggccagctctggaggtctgcaggggctgtgagtcctgtctctcaggcagaaaggattctctgcctctgagttatcccccctccctgggcccaagtgcccgtgatttattcaagccagagaaataggtgagcgggcaggaatcctgagtccctagcatgggagagtggcggagcagagctgaggtgacccctgggctgaccttcttacagctcacgggctcattggatctttccctcttcgatgttggtcaggatcctgctgcctcagcagaaacggactttctccagagtttccgactatacctgatcaggggcctgagcaggcccaggcgtgggatttgtgctggagcctctgagttcagatggtggccgaggcctgggtcctgctttgggctctgagctttctttgcttgtcagaagaggaggtcaggagctctaatcaggaggccggggatgcccagagggatactggctgagtgtggagttgctgtctcccctcccacgctggccactctggaccataaaacttcttcctcactaggggttctggacatggactcgggacaagaggagctgctgcagcggtgcacccctcaaaccacaccccacccagcactgccacaaccctaagccagtagcatcgtcagagtcaggcaggcccggctgacagcagggggcaaagacttcagcagagctcaggacactttggcctgtttttgaacgtgggaaacctgatgcagccagccagcatcaggggaggactttaaagagagaggggtgctcatatgtgggtttgggaaaactggagccaggggttaccaagtgttggctgtggactctacatctctgatatcatttagtctcacagctacccaccttatgaagtaggtactgttaccctcatttctcagaagagactcagggagggttaggactcacccacgtccacacagccaggaagttgtggatcagggacctgaaccagggctaccttgttaattcgcttgaccttagtctctgaccacccttcctcctattactgtaccgtggcccagcaagaaggtgagcatgggcatgaggtcacttgtatgggacttggcatcactctggcgacccaggtgacacttattggggttgtccatttatttcattctcatctctactattgcttttttttttttttttttttttttgagacggagtctcactctgtcgcccaggctggagtgcagtggtgtgatctcggctcactgcaagctgtgcctcccaggttcacgccattttcctgcctcagcctcccaagtagctgggactactggcgcctgccaccacgcttggctaatttttttatatttttagtagagatggcatttcaccgtgttagccaggatggtctcgatcttctgacatcgtgattcaccagcctcagcctcccaaagtgctgggattacaggtgtgagccaccgtgcccagcctaccattgccttttttttttttttttgagacggaatctcactctgtctccccagctggagtgcagtggcacgatcttggctcacagcaacctctacctccctggttcaagcgattttcctgcctcagcctcctgattagctgggactacaggtgtgagccaacacgcccagctaatttttgtatttttagtagagacagggtttcatcatgttggtcaggctggtctcaaactcctgacctcaagtgatccacccaccttggcctcccaaatagctgggattacaggcgtgagccaccgcatccagcccatgcctcttttctcctttcctctgtcaaacagctcccttctttagagattcactcctaaaactgcctccactttttttttttttttttgagacagagtctggctctgtcacccaggctggagtgcaatggtgtgatccagctcactgcaacctccacttcccaggttcaagcgattctcctgcctcagcctcctgagtagctgggactgtaggcgcatgccaccacgcccagctaatttttgtatttttagtagaaatgggatttcaccattttggccaggatggttttgatttcttgagctcatgatccgcccacctcggcctcccaaagtgctgggattacaggcgtgagccaccgcacccggccaactgcctccactttttatgtctgtacttgttggtgtaagataggaaatcagggatctgcttgtggctagaaacaacttcctgtctcagtggaaaagctctaccagccgacaggaccctgagctaggaaagctctggggtcaggcacacatctgggtgctgctttcactaaaggggttttcaactgaagggtctgtgccacagtttgaaccttgtcccttgttcctgtccccgtacagtcctgtacagtccctataagggcagaattgtgcttccctccccaattcctatgttgaagccctaaccccagtaccttagagtgtgtctgtatttggacatagggcctttaaagaagggattaagttaaaatgaggctgttagggtgggtcccaatccaatctgcctgatatgcttataagaaggggagattaggggctcatgcctgtaatcccagcactttgggaggccaaggcgggcggatcacctgaggtcaggagttcgagaccagcctggccaacatggtaaaacccctgtctactaaaaatgcaaaaattagccaggtgtggtggcacacgcctgtaatcccagctacttgggagactgaggcaagagaatcacttgaacctgggaggcagagattgcagtgagccgtgatcacgccattgtgctctagccagagcaacagcaagactcttgtctcaaaaaaaaagaaaaaggaaaaattaaaaatatggtcaggtgtagtggttcacacctgtaatcctagcactttggaaggccgaggcaggaggattgtttgaggccaagagttcaagaccaatctggccaacatagcgagacccctgtctctatattttattctaataataaataatttttttggaaaattaaaaatataattactacataatatagcaatttcccttctaggtatacactcaaaagaattgaaaatacactctccagccgggtgcagtgactcacacctgtaatcccagtgctttgggaggctgaggccagtggatcacgaggtcaggagattgagaccatcctggctaacacagtgaaaccccgtctctactaaaaatacaaaaaattagccagacgtggtggtgggcgcctgtagtcccagctactcgggaggctgaggtaggagaatggcatgaacccgggaggcggagcttgcagtgagctgagatcgcgccactgcactctagcctgggtgacagagtgagactccgtctcaaaaaagaaaaagaaaaagaaaatacactctccaggaggtatttgcacactcatgttcattgcagcattattcacaactgccaagaggtggaagcaacctacatgttcatcaacagatgaatggataaagaaatttggtggccgggcacagtggctcacgcctgtagtcccagcactttgggaggctgaggcaggcagatcacaaggtcaagaaattgagactatcctggccaacatggtgaaaccccgtctctattaaaaatacaaaaattagctgggcgtggtggcgtgtgcctgtagtcccagctacttgggaggctgaggcaggagaatcacttgaatacgggaggcggaggttgcagtgagccgagatcgcgccactgcactccagcctggcaacagagtgagactccgtctcaaaaaaaaaaaaaagaagaaagaaatttggtatatccatacaatggaatgttattgtcttcagaaagaaggaggccaggcatggtggctcacacctataattccagcactttgggaggccaaggtgggaggactgctagaagccctgagttcaacacctgcctcggcagcatagcaagaccctgtctttctaaaaaaaaaaaaaaaaaaaaaaaaaagaagaaaatcctgtcacttgctacaacctggttgaaacttgaggacattatgccaagtgacataagccagtcacaaaaatgacaaacattgcatgatttcacttatgtaaggtatctaaaatagtcaaatgtttagcaagagaaagaatggtgattgctagggggtgggggaagggaaaaaaggtcgttgtttaatggagatagagtttcggttttgcaagattaaaagttctagaaatcgattgcacaactactgtactgtatcacttaaaaactgttaagacggtaacttttatgttatgtgtatttgaccccaatttttaaaaaaggagatttcaaatataagatgtcccaggtaagaaacctcagaagagttcctttatgaaacaactgcaagctaaagtgagaaaatcaacacagattctagcagatactagacttcgacatttcttaactgtagctttctttgatactatgttatatgcaaatgtagctataaatttttgaaaaagaagaacaaaaatattcttggaaggggttgtttttgagctgggtggtttttaagtaggacttcaacaggcagaagtacggggaaggggagagtgctctaggcaaggagaaaccaccagagcacagtcagagagggggaagaaaatgcaggatgtgtttgcaaggtcagtccctgggtgtggcttcgtggcaggggtagtggaggggacctggggcggggaggtggcctgtaaaggggcatcaggagggaaaagaggagagaggcctatttgtggagttttataccttaggcaaatttgtggttgggcggaggcaggcatagagcaggtcttgcaaagagaaattggggcaggacagctctgggaacacacgtgttggagctgaagaaggatgagacaaatcacgtctgattaaaggcatgtctcagcagagtgaggacgtgagagcaggagggagcagtgctgagttctagcaccatggctttcccaggcgggcgatcggattcacctgtagccactctaatcacacgcaaccttcccttgaaccccatgaggaaaccaccgcaaaatccttcattcccataaattaaagacaaccacagtagcaaggacagtttgggggaaaacaacagtggcctcacagctgtccctgccagcaggggtctttaatccccattggcctggggctgggagtggtttgggtaagataacaccatgctggtctccagggtggggaagtgccaaaggccaggaaccctgctttctttctttctccccgtttgttcattttctttctttctttttctttctttctttctctttctttctttctttctttctttctttctttctttctttctttccttccttccttctttctttcttttctttctttctttttctttctctctttttctctctgtctccttccttccttcctttcttcctttctctctctctttctttctttctttcttttttttttttttttttgatgtagtcccgctctgtcacccaggctgaatgaagtgcagtggcgtgatctctgctcactgcaatctccacctcccaagttcaagctattctcctgcctcagcttcccaagtagctgggatttacaggtgcctgccaccacacctggctaattttttttttttttttttgtatttttagtagagatagggtttcaccatgttggccaggtcagtcttgaactcctggcctcaggtgatccgcctggctcagcctcccaaagtgctgggattataggcatgagccaccgcgcccggccaacccttgctttcttgataatttctttgagtagatcagctccagattctactgggagtgagcggggagcagttgaaggagatggcaaaggaggaaggaagcgcagagaacattcctcttacaataaactttccatttctggaggcttctcagccactcaatatggggtgcatttgccaggcccaactcaccccataacctctccggcaggtctctgagctccatgctcctgatgacaactggaacaaaatgattgccagaagttctctagactcaggaatttctgagacagcataattgaaatattcaattccaccatccccataaatatagaaatatttgtcagaccttatattctgaaggctggttcaggaaatatgggcctaataccatttacagctgctatttattgaactcttactatgtgccaggcacagagttaatctcatggatcactgcatctaaccttcacagagagactctctatggaaggggctactgctatatgcccattttacagccagggaaacaaaggctggaagaagttatgaacttttccaaagtcatgcagccaaaagttgccgtgctgacactgcagcctgtctgtctggctgggaagaactatggaaaacgcgtttctgatcaatgctggttaaccttccagggaccactcagcctggacttggggaggcccaaatgcaagggcatgcccaacccctctgtagtcaagatcaataatattttaaggaaggccgggcacggtggcgcatgccagcactttgggaggccgaggtgggctgatcacgaggtcaggagtttgagaccatcctgaccaacatggtaaaaccccgactctactaaaaatacaaaaattagccgggagagggggcgtgcgcctataatcccagctactcaggaggctgagacaggagaattgcttgaacccaaggggcagaggttgcagtgaattgaaactatgccactgcactccagcatgggcgttagagtgagactccatctcaaaaaaaaaaaaaaaagaatattttaaggcaatatttgtaaaaatcaaaagtaatgcaaaaaattgataatgaacaaaatatcacaattttggagaggggatccaattatagactcaggattggcagggttgggtggggggctctctgtgggtttgccttttctgagctgaattccagattcctggagtaggtcatgagccttgcgtcactttcccccttctttgggctcttacaaagctgatctttcttgcctccttcctccccttcagttaaattccaaaggaggatgcaagcattgcggcaataaagatttccatgctgaacagtgagtttgtctggaatcacagggggatgagtgagagtcagctcactgggccctgcctcatctgctgctggtgctcctgaggggacccttagggaagcccagggcccctgcggatgggaacctccctccaccaaagtctgaccctgaagcatgcaggccgttcagccgagggtgtccctgtactcctgggtggccagctgcttagtgtgaatggtctctctgcattgcagggccatcggccactcgccaaaaagagagctggtgcatttgggttttgctgagactcggaatgctggaagattctgcctgagcccagcaggctcttggctttgctatcccttcccaatgcccttggctgtcagttctctggaaagtggcagagaggaaggagccacagtgctgcgtgccgccaccaaggggaaagctcttcaaccaggttcagagccaagtcgctgagagttgcttctcatccttagcacatttcctaccaggggcaggatgagttaattttcgggatggggatctaactggctggcggtttaaagggcccttctatttagcagccatgagggctgctagagttcctatctcccattgaagaaggggcttcttcaagcagacagaccaaacatcatttcaaaatgaggactgcatttgaaatctactgaagggggtgataccgggggcctgaagcctggggtttgagctcacttctagggtgaccaattcttctgtttgcctgggactgtggggtttcctacgacaggattttcagtgctaaaactggaaaagtcctgggcaaatggagatgagctgctcactctagtttgaccccattctttctgtgttctcaccaactttcagtctttcattttgcagattgagagaatcaaggtactaataaaacctgctgtccccatctcccaaacccgtgggactcaaaagagctgacgtcagtatcccatggcaccttaagcctccccatcagggcacatcccactgctgacacacctctgcaggcctcttcttcctctcagtttgagctttcttgggtgagacccctttattcatctcagagcattcctgggcttggctaagagcagaaactcgggaaagctgtgcttataaagcaaagcacaaagcattcccacctgttggttggtgtccttcttttctgtcctgccctggttagccccatgggaaggtcctctacaggctccgacagacaggcgtgcccctgagggcggctgtcaggaggaaaacagggcagcacgggcaggaggcttggtcactgctttgttctgaacgaggccgggacaaggaaccagacaaaaggtggacaggtatagtgagcaaccagggagggcctggtggggaggtgaggaagcagcaggtccccaccctggggaagagaagggctttagctggaatcttaacaaataggccaatctcatcctccagcctctgggactccagcacggactcccttggctgcctgcctccctgactctctcagaggctgcccatcccttgcagctccttgcggggctgccttcctggggggtcagccagatctcagcatgctgagttgtctgtccccttggcctggacatggcccagctccgcagggtgatatctggtgggcagtctgccccaaacctcagccctccatctccccctcaccccttgattctcccatcccagccgcaggcctgcttctctgcctctaggctcctggacacatagggtcttggctttgggtggccacccagggtcccagcttcagtcttagctctcagagccttaacctcagctgaacttccctggtaagcgagccctgtggctctaggaccacttggggctggccaaagcatggtggggaggaggatgactcaatggcagcctgattcaggaaagcccctcaccagccctcgccagtctgcacccagaggatccatttcacgtgtcctccaaatcctggctgatcctgtttcattctcttgctggacaccctttctggggcccaggagtgctgggacacagacatggtccccatcaccagagaatcctagaactctcagtggaagaaaccccaaaggtaactggtccagtctcctgcatttggatggactagacagaaattcatgctcagagcacctaggcacagagagggtgagtaacttccccagggtcacacagtaaaggaatgatcagctgctcctgagccacctacctgaactctcctttctccgcctggatgatttcttctctgtctcattggcagtgctcccaagcaccccgtagtcatcgcctgggcctcctgtggtgtccaccaggcccaggctgctggtccccatttccttggaaccccctgccgggcctgagttgggcctgcgccgggcgtctgagacagggaagtgccagttgggggactgtgggaaagcggggtgctgctcagtgaagatgtgctcctcctggggcaggctgtgtggggtggctgccaggcaggaggctgagaagtcagggtacgctgccgtcgctgtcgccaggaagtctggtttctggtggaaggagaacggggtgggcgggtagtggggtagccctgaggccccattgccttccgagtgggggtttcgaaggcagccccagacaggggctgggggctggaggctcctcatgcagctgctggccgcgggatccatctgctgtccgctgcacgcctcggtcctttcaaagatttgattctttatactttttatgttcaaatttttaaaaatgcaaaagaaaaaaaactaaataggagggaaaaatgttcaacagaaaatttaccccaggaaccaaaaaaaaaaaaaaacccaaaactaaagtctctccttaaagtacacacacatgtggccagctactcctatgtgtgtgcacacacctatgtcgggcttgctcctgcccctccaatgcaccagcctacctactgggatcccctgtatgtgtatttgtcgccaatgacactaaacattttcactgtcccaacccagacgcaccagctgacgaggagttcgtcctggagcccagagcaaatgcctgcagagggctggaccagggctgctgggacacacttttaaatcctgcggtggggagagagtgacaaatttctgaagtgaaatgtgagagaggagagggaggggttaacccacacacacaagatcccctccaaccaaaaccctagcaggcaactattaatcatcagaaaccttatatgcacatctaatgggatttgcagatggagacttttaaagaaacattgtctgtattttttttttaaggaaagagagcagcacacacacacatacacacacaccgtctttaatgtgcctcctgtaacactatgaagttatttttattgcactgttaacaaaattccccaagtcttggatttagaaaaagccttaagtcagatccagaatccatcaaatgccaaattccagggagtgaagtgaggaataagagcaagagacaagcttggtgattgcatttgatttaaaggcccttctactgctgcctgcgaaaaaggaaggtggattaaaagaaatcttttttgcaagtctcagcggcccactgtggtctgcagtacaaagaaaggcacactctagaaaaaaagaatttctctctgcccagagtgacattctcactttctcagtaacttaaaaaaacaatcagattcttccttccgctctttaacctccaacatacatgccaattagccacactcttctctagagaggtttcaagtcatttttcttcacagcaatggcaaggctcttaaataaggtccttgaagtttcttcgggtctcctcccacctgctccctgcccccttcacctccacccacctgcttccctttctcatcccccagaggcggaggcttccgaggaatttggggtagggaaataggaatcaggggctcctcattccccaaaggagcctctttggcaagcaggcacgtgggtctccgggctggtgcacatcacagggcagccagcccaagtgccatcttgatgcccagtcttcctcatggctgcgccctgctggtctctcagagggttaatgcaatttcttggaggacgacattcctaacacccaggggccagaactccttccccactggttattcccatggcccagagcagcaggatgggggcagaaacaggcatggaccttaacagcagcgtctctgctggctgcttccaaagacggcgagggttccctgaggaggggcccctaggtcttagctctgcagcctggaggtggggccctggggggtgggtgcaggagatgctcctaggaggagccgaagggcacccagggatgtggaatgaagccacgactggcctttaatccagaaactccagtcagatacacatcctgggagcaggagcagctgtaaaagatggggaggggtgtacatatgaaaagatgtgccctcttctggaacaagcggtcagagtgttgtagaccagtagagtggatggggtcatagctgtcaaccagactcatctttctgctttgcccagggcttagctgtggcacacacaattctctgagcctcacaactttcctaggatgggtaagtaagaattatgtctccattttgcagatgacaaaaccgaggctcagatggatgactgggctgcccagactcacacagctaagaaatggtggaatcagcacttggcctcaggtgtcctgctgttcagtttggagcaggccagatgcagaggaggaggcatggggtttgaggttagacgggtctgagttcaagccccaggtctgccacttcctggctgtgtgccctggaacaagtcaccttatctctctgaacttcttttttttttttttctttttgagatggagtctcgttctgtcgcccaggctggagtgcagtggcatgatctcagctcactgcaagctccgcctcccgggctcacgccattctcttgcctcagcctcccgagtagctgggactacaagcacccgccaccacgcccggctaattttttgtattttttagtagagacggggtttcaccgtgttagccaggatggtctcaatctcctgacctcgtgatccgcccgcctcggcctcccaaagtgctgggattacaggcatgagccaccatgcctggccatctctctgaacttctgtttcctcatctgagatgacagtcagagtgggatctgtgtaaggcactttgcaccttacacatttttacccccacggattcccacaaaagccttctgaggcaacagtcattctcatcagctccgtttctctctctctcttttttttttatcagctccgtttttcagcagaagactctgatgcacagatagactgtgtaacctgcacaaggccacacagcagggaagcggcggacccaggattcaaattgaggcagcccagcccacagacatttgcaaatcttcaatgaaatcctttatgtaggccaggcacggtggctcagacctataatcccagcactttggaaggctgaggcaggcagatcatttgaggccaggagttcaagaccagcccggccaacatggtaaaaccccgtctctaatagaaatacaaaaattaggccgggcgcggtggctcacgcctgtaatcccaccactttgggaggccgaggcgggtggatcatgcggtcaggagatcgagaccatcctggctaacacagtgaaaccccgtctctactagaaatacaaaaaaaaaaaaaaaaaggcgggcgtggtggcgggcgcctgtagtcccagctacttgggaggctgaagcaggagaatggtgtgaacccgggaagcagagcttgcagtgcaccgagatcacgtcactgcactccagcctgggtgacagagcgagactccatctcaaaaaaaaaaaaaaaaagaaatacaaaaattagctgggtgtggtggcacatgcctgtaatcccagctactcgggaggctgagggcaggagaatcgcttgagcctgggaagcagagaggttgcggtaagccaagattgtacaactgcactccggcctgggcgacagagtgagacactgtctcaaaaaaaaaaaaaaagaaaaagaaaaagaaataaagaaagaaatcctttatgcaaaaggcagagtaagtaatggacaaatgtggctcccttcctagcacatctatttctggttaacctcgatgatcccaaagggtgaacctgggaatggggagttctgaggaaattctacagaaacagccttgtgaggtcctttgtggggggcacgctgtgctgtgggggttctggaaggaatccgtgggaggctgggaggaagatctggcttgtcagcttccctaggaaaaccttcccctgggctggccgcaggctgtaaccggattcctgctccacctctgcatctggcccagggacctcatggcagggaggcccagcgcctggccctttgcccctggacggggtgggccctgggtcatggtggggtgggtggggaggtcaggagggccatggggagggggcgcggtggggtgctttgccctgagaacacaggcctctggcaccccggagcccccggcagctgctggcgtctgtcagccaccttgcggggcgcggccgggggctgctggcccctacatcttcctgacaggcccctcttctgaggccaggaaaaaacaacaacagttcctcccctcacggcaacccatttgttagatgaaggccgggcaccagcacctttaacctcctcaaagtcagcgtttccctgtcaaggccccacagggccagagacagagatggatggaaggagctgtgtgtcgaaaaagccctgtggcctcatgaggagagctctgttttcaggaagggaggggaccccggtttctgattgttggggagaataaggggaggaagaggaaaagtgtgagtcacgaggaggtcccccaggggcgtgggggggcccaggagggctttcagcctggccacacctgagccatcacgtggaacttgcggaatgtctcccattgtgcgtggcaggcaggcgtgtacttggcaggacagggctgcttctgtttgtggccaccccacccccttgtgcttggagaggcagggtgtcagggcaaggccctggacctggaggcagaagacacgggttcaaggtgtgaccttgcctgttaccggctgtgtggtctcaggcaaatcacacccttctctgagcttcatttttctcactggcaaaatggagttgacagttccggcctcacctggcggttaggaggataaatgaactgcatctgagaacagagctggctgactataaagggtgatgcatgtgaggaatagcttgtccttaactatgctgaaccactgggcaggacacagcacaatgtaggtgaagacggctcatcccagcccccagataccttctatggcaacataacacaagggtccaaatcatggccttgggaattgggggcctgtgggttcaaacctcagctctgtttttttgttttttgttttgagacggagtcttgctctgttgcccaggctggagtgcagtggtgggatctcggctcaccgcaacctctgcctcccaggttcaagcgattctcctgcctcagcctcccgagtagctgggattacaggtgtctggcaccatacctagctaatttttgtatttttagtagagatggggtcttgccatgttggccagactggtttccaactccccacctcaggtgatctgcccgccctggcctcccaaagtgctgggattacgggcatgagccactgtgcctgacctcagctctgttattaataagctaaatggctttgagcgacttgccttatcacttgagcctcagtttcctcatctgtaaaatggggataaacttcttccgtccgcatgaggatgctgagagacgtgagtgaggtggtctatgaaagctcttgtcatagcctggcatgcaggggtaacatctggatgatgaagatgatgatacctgagatttttgccttacagacaactccagagagccctgtgaaatatttatatgccactgaacagggcacaagatgaagccattagcctgcgcttacatagtagaatgtgtgaatcagatgagatgcttggtctctagtaagaccttaagggatggacagaagacaggcagattttggatatggtatacgtggctgtgggctagcgtgtttactactgggcctgggatgtatttggaatgtacacatgtgtcctttgcttctcagaacactttgaggcagcagagttactactgcctgccagcctgcctcacagggttttttgttttgttttgttttctttttttttgagatgagtttcactcttgttgcccaggctggagtgcaatggtgtgatcttggctcactgcaacctccacctactgggttcaagcgattctcctgcctcagccacctgagtagctgggattacaggtgcatgctaccatgcccggctaatattttttatttttatttttatttatttatttatttttgagatggagtctcgctctgtcaccaggctggagtgcagtggtgcaatctcggctcactgcaacctctgcctcccaagtttaagtgattctcttgcctcagcctcccaagtagctgggactataggcacgcgccaccacacccagccaattttttgtacttttaatagagacgaggtttcactatattggctagggtggtcttgaactcctgacctcaggtgatctgcccgcctcagcctccaaaagtgctggaattacaggcatgagccaccgcgcctggccctgacagggctttgtaatgctcaaataatatgatccaagggtcagagttgagtaaactatagaacatagtccttgcattccaccccaggggcccaataacgaggtctttctctaaatctcagaaaacactaagctaagggaggtaagttctgcagatgggttttctctgtgtgtgtgtgtgtgtgtgtgtatacatatatatatacacacacacatatatatatatacacacatatatatacatttaaacctttggtgctctacttgtctgctaccaaaattgtaggcagatgactgaaaaatgtaacacacagaatggcctgcatagaaacctggctcttggaagtcatatgagtcagtttcctcaactgtaaagtggtggctcactgtacagacactcagtaagcacccagcaaatgaacaccttccaggggttctgtattggagtcagctgtatagaatgaaaacaaatgacaaaaggggaaacacacagagtttattattctcccccataaaaaaggccggaggtgacagtccaagctgagatggcctctcccccaggcactgtctctctactttgcccccctgcggcaccttgttcagctggcatgtcagcattccacacagcacgaaggaggaaggacaaatggactctccccatctctctgcccactgcccccctccccacaacccgtttaaaaaatagatatggggggccgggtgcggtggctcgtgcctgtaaccccagcactttgggaggccgaggcgggtggatcacgaggtcaggagatcgagaccatcctggctaacacggtgaaaccccgtctccactaaaaatacaaaaaattctccaggcatggtggtggcaggcgcctgtagtctcagctactctggaggctgaggcaggagaatagcgtgagcccgggaggcgtagcttgcagcaaggcgagattgcgccactgcactccaagcctaggcgacagagcgagactccatctcaaaaaaaaaaaaaaaaaaaaaatagacatgggggcctggcgcggtggctcacgcccgtaatcctagcactttgggagtccgaggtgggcggatcacgaggtcaggggttcgagaccagcctggtcagcgtggtgaaaatccatctctactaaaaatataaaaatcagctgggcgtggtggcgcatggctgtagtcccaaccactcaggaggctgaggcaggagaatcacttgaacccgggaggcggagcttgcagcgagccgagatcgtgccaccacactccagcctgggcgacagagcgagactccgtctcaaaaaaaaaaaaaaaatagacatagggtcttgctatgttgcccaggctggtcttaaactccttccttgagtgattctcccaccttggcttcccaaagtgctgggatttacaggagtgagacacagtgcccagcctctctacattttttttttttttttttaagacagactctcactcagtccctcaggctggagtgcagtggtgtgatctcagctcactgcaatctccacctcccaggttcaattgattctcctgcctcagcctcccaagtagctgggactacacgcctggctaatttttgtatttttagtagagacagggttttgtcatgttggccaggctgatctcaaactcctgacctcaaatcatccacccgccttggcctcccaaagtcctgggattacaggcatgagccattgtgcccaaccctccctgccctgttttaaggagggtcctgttcaacaattactctacagaccaattgcccgcaactatatacttggcagtgaggaactgctggggaggctgggagattcagcctataggcaccttggtggccctaataactcttttatcttcttcttcttccccatcagaacctgttctcaaggaaaagagctaaggtaggctgccagataaaatgctgaggtaagtctgttccagaaaatattgggacatagactaaaaaattgttgtttgtttatctgaaactcaaatttaactgagtgtcttcttttccccctaaatctggcaatcctaatccaaggctaaactcattttcaggacgcaaaaggctctggccttaccttttgagtcaggacgttgcactttgacagaaggctctggaaggaaactttaaagggagccttccagagggaaatgcggtgttggggtaggtctgcctttggctatgggctttctggctgccggagggcccagggtcccccaggaaagccttctgtggaggtcttttgagagagacaaagcagaggggtggaggaagggcggctcaggtggaaggagtgaggacaaaggtgagtgcccctgggcaggaagtgctgaaagagagaaggagggaggccaccaggcctgggcctggagccagcctgggagactcccagccgcccacttctcggggcctcccttttccagccccttgctttcgaggcagcagtgccattatttggggaaaccagctaaccagataggacagcaaaccggggatttatgtggtgtgggaacagctcaggtttccctccctgtttacccagcagtattttttaaaacagaaatcagcgtgtgggtaaccgcagctgtgagttactagctctggctgtgagggctggggtggggggagtctcttcagagccctctgtccactggcctgggagctactgaaggaatgtgcctctccccatcccaggccaggtggagaaggtggccctgcggaagttcccagatcactgcccacctcacccttcccctcccgacgaaggccagcacacctgggggaggtgtgatgatggttcaaggtctaaagctttagagatcagtcagtttaggggtcagaacccatggagccaggcaagtaaacacaggttccccaagccagctgggagggagacacctgggtgcctttgatgggagaaagagggggccaacagctacttggcactggccaattttcccttgcatgaacatgggcccagtgtaaccaaccatatctttccatttgtcaaaaaaaagccatatttccagattttttataggcaacctgtcaacttttaaatgttggcaatgaattcaaaacactgccattcaattaaaagcagcccagaacatggcacgactggttcttggaataccaatctgcaatctctgatcttgtccaactctctctgctccccattttacagatcaggaagctgaggcccagagaggcctagggacttagccatggctgcagcagttgttattgggaatgccatgaggccaggatgcctgttatgtgttctttgcccagcctagcagtttggctggcttggctatgccagaggtctcaccatgcagttctcaagtgcttcctgagcatctctcatttgcatagacatgacatttacaaacacatccatcatctacttgattctggcaatgacaccgagggagcagaactggcattaatccattttttttaatggtgagaacactgaggtttggagaggctggtgacctgccaaagtcacagtcctagaaagggctgcagccagggcctccaattacagatcaagggtttttccacccccaaactcagtcatctcgtaaaaacgtcaggctccttggggaatacagcttgagatggataatcaactcctcctaaaagggaaccataaatggatgagatacttgggtaaactgaatattctttgtaacttaaagttaattgaaaatccataggttatcaattttccaagcaggagaataaaatagaaggtatttcaaagagcaattatagtaggcatggcttaatctttctttgatgattctgaaggcatttcaggggaatgtaatgccttagggcatcattatgaacaccaataattactgtgtagggctgtgacgcaaattctcatcaatcccctcctggctgtcggggtgttttcagagaggatcatgcagggagtgtgaacgtgtgcctgtctgtttcttgctgctctctccgcctttgtcaatttcagggtgctgttgtggaaaatgcagtgtccctggaagggggaggtcacttaaccttaatgagcttctgtttctttattaaaatggggtaatgcagactcctatactcactgtcaaggttttgtggggctcagatgtcagtgtcagagcaggaagaaactttagatcatgatatgcaccagcttcattctgccatggaaaaatctgaggcccagagaggttaggagcctcgtccaaggtcacccagccagggagagggtgctagaacctgggttttctgcttcctaacctctttcctgaatataacactatggaagaaaaagatctggaggaacggaaagatgaacacatgattacacatgcaaacaatactggggtctctctgatcagagaaggtgtgatcttccagcctcaggagaggggccatccaagtcctggaggaggtgaaccccttagttcagggctgggagtagcctgggggcagcagagacactgctgtgaggtttatagtttcatgactgtcagagctttttaaaatgtggtaattttaagtgtgcagcctcccagggtctttcttcttttaattgaagaaataaaccatctcccctaaggcatgcttggcgaaggagaaaggcaggtgcaaggctcacagaggagagcagcagcctagaagggctctgtgtcatggggaagtaaaacatcccagaaacagagagcagaaggccttgactgagccccaggagaggcaggacaccaggggtgcacacccataaacacacacatacacatgtatgtctcctccctggagcctgagagtccctatatacagcaggtgcatgtgggccacacatcacacaaaattgaatacaggcaggctcagagcaccagcacacacgtatgtccttgacacccttagagatactactaagcacgtgtgtgtacctgctcacccatatggcagagcccctggatctgggcagaaatgccaaagcaggggcaggcgcgtgtgcgcgcgcacacacacacacacacacacacacacacactagcacagccacaaaagctcaatccacatccagcattcctaacaacacacacacagctagacacgctaggagacacatcaggacaatgtttccactcccgctgccatacacatatgcaggtccacattcaccagtggggtagggtagagtctcatcagtccagactcgcagacagctggacacagaggtgatctctgaaacccaatgtctacacactgtggtctttgttacacacacacacacacacattgaaatgatgtcctcagcctttggttatttttggtttcttctgagctggagtttcactcttgttgcctaggctagagtgcagtggcgtgatctcagctcactgcaacctccacctcccgggttcaagtgattctcctgcctcagcctcccaagtggttgggactacaggcgcccgccaccacaccctactaatttttgtatttttagtggaaacagggtttcaccatgttggccaggctggccttgaactcctgacctcagatgatccttccgccttggcctcccaaagtgctgggattacaagcttgagccaccgcacccggccgagccttcgggtattttgaaagctgaatgtgtggttacattttcttttctttttcttcttttttttttgagacggagtctctctctgtcaccaggctggagtgcagtggcgcgatcctggctcactgcaacctctgactccccggttcaagtgattctcctgtctcagcctcctgagtagctaggattacaggcatgcaccaccacgtccagctaatttttgtatttttagtagagccagggtttcaccatgttggccaggatggtctccatctcctcaaatcgtcatccgcccgccttggcctcccgaagtgctgggattacaggcgtgagccacagtgcccggcctacgttttcaaacagcaatagcattcgcctcctctgtcagtttaacccccatcacaactcccacttttggcacctaaacagttaatttcccagttcatgggccttcaaagtcctgctctagtctctggaggaactttcacctacagaggaaggtgtaagggaaactagttcatggatttaagtagaaacattttaggtgtagctttcacatacagaggagtgagaaaaaactgattcatggatttagatggaaacattgtagtatgaacccagcggagggtctgggagcgccttctggtggtgagaattagaaccgcagcactttctgcaatgtgcccaggccagaaagctctaccttctgataggacccacttctgaccctagaatgggggaactgatggaggtgtcaagccactgtggtcccacagctgcatgcaggcacaggggataggaagagagctacctacaggttactaaaccattcccttttaaaacagcaccaggcttatgtctactctgcgcttccattttctaggttttaagtggaagatatgtgaacacccagtgggctggatggctgtccctgctacaagtctgtgatgtctccgtccagtggcagagctggaaggcaggtgctgtcggggctgcatctgccttgttcaccagcataggcctaaaaccatggagggggtgctttggcttagatccccacttggcctgtgtgtgtaagaggctctcaggcaccttaatgctacatcaccaaccaaacctcctgatgattcttttaggttctccgtttccaggcagattcacttctgtagatttatttatttatttttgagacagggtctggctctgtcccgcaggctggagtacagtgatgcaatctcggctcactgtagccttgacctcaacttcaagtgatcctccaacctcagcctcccagtatgagggaccacaggtgtgcaccatcacacctggctaatttttgtactttttgtagagacggggtctcaccatgttgcccagctggtctcaaactcctaggctcaagcgatccaccaaccttggcctctgaaatgctgggattccaggtgtgaagcaccgcgcccagtccctgacttctgtagacgtttgtattgtttacatctactgtgtgcaatgtacgagatgcagtcaggtgtctggatggaccaggggatctggcatcttatagacttgggtttgaaccccaactgagccatttactggctgggtgactttgggtgagttcttaaacctctctgacccttaaggtggtaacagtatcaccagtgaagttggtgcacacagcagggcccaaactgacatctcacagcacccagcaggtcactgtgggcatgataggatgatgggtcactgtgccagccctgaaggagttcaagtccagataggggaaggtggtggaccagacccagacagagattctgagtcgctgctgagactgggtgagggtagtgggtacatgggaggacatatagcccggcagcccagggctggagtccacactcaggttggggcagcctggtctgcctctcctgcaggagacttttccaggcaggcttgtccctccagaatgcacgaatcaaatcctctcaggatcagtctcattttcctcgtgctgggggagcaggctactcacagaagatgttgttgcaaatgtaagaatcacatgtcgatccacaaactggcattgagcagctacctaggagatcaaagaaactcttactttgggagctcctgccagggctctttgggaggtctggctagctctggaggaagagaatgaacttggggagggcgtggaacagatgaggacgcaggcactgccattcaaagaggagaggtctcccggacagggctggcctgggcaggcccagggagggtggggctggagcagggacttgaaaaagggagagggctcaggagactcagaggaggaggaaagtgtgtgagcagtaggcagggtgtgtgtgtgtgtgtgtgtgtgtgtgtgtgtgtgtgcacgcgcgcgcatgcaggcctgtgtagggctgggaaagaacaaagcaaaagggtgcacaaggcatccagaagccagggcaatgcagaacaggaacaaagcagtttggctcaaggggaaagttctgatggaaagcaaggaaagagaatgttagaagggctgagagccagaatgcccagtatggggtacagagggcaacagaggggctgatgttggtggcgaggtggggaggagcatttcacagggaactgggcagctccaaggatgggctggaggagggacggtcctaaagggggtggtgggagacaggcagttagtgatggggggagagaaatgctctgaggggggctgctgtaggcagggaggggcaggtagcaggaggcagagggttgagcctgcagaagcccggagcagtctgtagctttctaatgcttcctagggaattctgctgctgagtagccatgggttcaacaggtctctaggatttgccttgaattactgccctgaggccccctaagtctggggtctcataaattcagcggggagggcacacctgtgtctgagtctgagcagcccagagcccccagtgttgtcagtgaacagctcactgaacttgcagagcaattaaatcccagggcagaagaaagagcaggagggcagggtggcccccagctccctcccatcccgggtttggggagagacacctctggcctgagactcctcgtggcctctaacaagtcttgctctctctctcttttttttttttttttaaattattgtctcccgccctccttccttcttcttgggaatcagaaaagaaacctcaatgcctggctttgcccctccctggctgtggtcaagccatgtgacatttagacatttcagagcctcctgactcctgaggctggagacagcatgaagccaaatgggcttggcaaacagaagagaggggcagttaacattctctgcaatgctctcttacttcccgtttaaacacccctcctactcggacacagacccccaacccctgtgccattgtgctcactcccaccttggaggggtcaggctgtggtgaaaggtcaaggtgaaaagtcatgatgatcctattgctgccacctccctggggtgagcaagattctgtggtggctccagctctcccatggcagtccacacagaggctgttccaggttctggagaggtcacttggtgtgacctgggaatctgcatcttttctctgccaaagcagagggcattgcagcaaccacacctgggtcccagtcctcaacaaagtccctccagctcccgctgctgtctgcaaggtttggtcatctgtccctgcattggagaagagtttgcactgtgaatcttgcctccaccagggaaggctggtaaaagtccctgccccgggggccctcattgctccagggtgcatctgggggccagacctgtggaccctcacccttgagcctcattttgttcctcttagaacaaagccatttctggtaaataggtttgatgggtttggcagcagggaaggcacagaacctttcacgattagcaggctcatgacaatttctctttaggcaagagagaaggttgaggaggaaagactggcagggcttggagagctggaaaggaagaaaggccctacaggcctggggatcccatctctgaccaccgaccccagcccccaactctcatagactctgatttgatattcttatttaccaaagaagctgcatgtatttgcatatcaattctctttcccatatcgacacgcagggaggcttcttcgttttggatcaaccagagatcaccaatgtctgcagggtgctcagcccctggtaccttggtcactctaggcagcctcctagatgtgcctcttaagataggttttctgaaatgggagaggaccacgccccgccccccaccatggactctggagtctgcggcgcacaaatcctgcgattttacagatggggaaacagaggcacggagaaagtctcagctttcccacggcccactgggaccagaacccaggtcgcaggacggggacagccacctcctttttctctccttgcaaccagcctgagctcgctcagcgggtgggggctgccgctatccagagcaccctgtttctggatgcaaaataaaggcccaggcagtgtttggccctcctctgcccacagactttggctccagggcagtctccgagagagaagccttgggtcccactggtccgagctctgcgtgctgagtctagaggctgcagtctctaagccgaaactagcccaggcctcacagccgccttcccgccggtctcccactgccttggcggggcgctggcgccctctgctggccaagtctcgctctgcgcgcaaacgccccagaaatcagccggaagttccctggggccccacaggagtgaggacccacctggattcactttgtcatttttttttagctgcatgaccttaagaaagctaatgaacctcagagcactacctgtgaagtggaaataatagcgcctacacttcagggtcggtgtaaggattgcatagaataccgtatagaaagcacccagcacattgtaggtatgtttaatggtagcgattattaataatgcccaactcacatggtgagatgagatctgagaagcctccttataaaggtaaatgataaccaagtcttgttgcaaggcagctggtgtgttactaatacatcatgaggtggtgggccctctggggactgtcaggagacagcctctgttttattaggaaataaaacagaatctggtctgctccagttttcttccttttatttactgcattagaaaactttcattttatttattgcctattctgggggttgagggtgaggggaaggcatgactccagccaggtaggatacaaaagtatctcaccccccaggaggggtttgaggaccggccctccggcttttagagaagggcagctggcttctgttgctaacgatttggatttggcttttaacagaatatcaaggtgaaagtgaaaggagcttttcactccttggagagtcaagagggtgtggggtgggacctccaggggaatgaagagtgagcgagggtgctggggggatcccagacctaggaatcagatctggggaaggggtctgcaagacccctccatgagtcaagaaaagccggtgggtggatggtgagaaggaccagtgaagacactgtttgctggagttgtcccagccagtggctatgactgagactgtcccatggcgtgtgcccagggtcctgccattggatgatgggacattcttttttttttttttttttttgagacggagtctcgctctgtcatccagagctggagtgcagtggcgcaatatcaaagtcgctgcagcctccacctcccgggttcaagcaattctcctgcctcagcctcccaagtagctgggattacaggcgtgggccaccacatctggctaatttttgtatttttagtagagatggagtttctactccatcaggctggtctccaacttctggcctcaagtgatctgctgcctcggcctcccaaagtgctgggattacagacgtgagtcactgtgcctggcctggatggaacattctgctctttctccatctgctgcctacccatgatgtcttgggactcctagaaccctaaaggaagcccctggacacgcaggaaggtgtggagaggagttctcatacttgcacttgggaggagggctcaggagaaacagaggctggcaacaccccctcacacactggtcctctggagggccagtgtctacagacactgtggactgagtccacagagaggaaagggtcctgccttcatcagaactgctcagcaagcagttccatcccagggggtcctgcgaggtaagggaggggcagctagctaggtgaggggctgagagagtggggaggggaaagagggaagaagagagtgagagggagagggagggactgagccgattctcagctccttgaccgtttgctgagctctgtctgagtggacagatggtcccaagtcaggccacaccagagtggcctttctgctcccctacaccctgcattcctcaacattgctggccccggagagactttccttcagagaagcaaatggctggggaatggtgaaagacactgcagagaaaagaaagcacagcctgctgccctgggaattaacatgatttaggagacctgcaggtcaccccctcatgactaaaagccatcctggaatgaaggtctgtggctatttctaggcaaaactgtctgataagataaaatagctcaactcctgaccattaagtcgtgaaggccatggccatcgtaaatctcatctttccggccctctggcctgcatgcagtgcagcccagccagtcggtggcagccaccttggtaggaagggccctcatcctcctggctgtgccccaaggactgggcaggcttcggtgccaagggtagtgcgagcacttgaaagccgccctgtatgtttattgttttccccaggtgatccagaattactcccgaactctaccagctgaaatcctcctcaactcacatcagacaagacggccctgccacttacctgtcagatcactttgggcaggtaagctcattttcctgaatctttacttccacaccttaaaatgtgagcaatactatctccctggcaaggttgtttgtgagggtaaaatgaaacaataatcacgggtgcatcctggagctctttcttacaaggcgtgcccccaaatctgtcccctctttctgaggatgcccttcccctattgtctccctggccatttcctacccattctcaagggccatgatctcagggagttctcctgactcacccaggcatattggatctcctacgtactgctacgactgcacacaggtgcaggaaatggctgtttgctttgcgtttgaggaacttggaaagggagacgtggtagggaaagtagtggttaggggcactttcagactgaaggatgtgggttggggaatacgggattcttggagttgaggacgccgcttctctcgtctctagctaatgtgagaaagacccttctggacactaagcctgcaattccactggtggctaccaggtgtccgtggtgtcctggggcgggtgtaatgagagcgggagcctgtgaaaccaaaagcattgtttttataaattcagcactcttcaatccctattaataaggttagcggtgcagttcttgcgtctcctgccctgcctcaccttgcaatcatattcattggcattcctttcttccaagaacccacctaggaggccttgcaggagatatctctggtgctggctgttcctgcagtctgaaaagccagttaagatacaaatatgtgagaggacactgcttgaatctgatttcattttttaaaaagtttaattattcacagactttgcttctttctgactagtaatgtgacacctgtgactcagttcaagatggtgtgtggtgaccttgcagttgagaagcactgagcgctatagccatgccaagaaggttgccctcctgggaccagcaaaaattccatccagggggccatctctgtcaggcttgtcctgactatctttttggagaggcggcagagtggagtggttaaaagcatgattctggagcccagctacctgggagcaaagctcgtctctaccgcttaccagctctgagagcttaggcaagtgacctattctctctgtgcctctgagttttcatctgtgaaatgggagtaacaatagtcctgtctcacagggttgctgggaggcttgaatgagttaatgtccatggggtgctgaatcagtgcctggcatacggtgaaggccatgtgagcagtaaatattattattattagaaaggttggctgggcgtggtggctcacacctgtaatcccagcactttgggaggctgaggtgggcagattacgaggtcaagagttagagaccagcctggccaacatggtgaaaccccatctctactaaaaatacaaaagacattagccggtatagtggtgcgtgcttgtagtcccagctactcaggaggctaaggcagaaggatcgcttgaacccgggaggcagaggtttcagtgagctgagatcacgccactgcactccagcctgggcaacagagtgagactccatctcaaaaaaaaaaaaaaaaagaaagaaagaaagaaaaaaagaaaaggtcccaacctactcacttattgttcacttgcatcaaatgctaggttcagtgtattgttcttgtaagattagaaatggagagatgggtcagaaggggttggtcaaaatagacctctcaacccaagcagacagggctggcttcatggccgggcaaccatgcaggacccagggctctaagataagaaaggcacgtagtttaatgctttgctgtcccatcttgatactgttttttttttcttttttttttggaaatggagtttcactattgtcacccaagataaagtacaatggcgtgatctcagctcactgcaatctctgcctcctgggttcaagcaattctcctgcttcagctccttgagtagctgggattacaggcatgtaccaccacactcagctaatttttgtatttttagtagagacggggtttcaccatgttggccaggctggctggtctcgaactcctgatcgcaggtgatccacccacctcggccccacaaagtgctgggattacaggcatgaaccaccgtgcctagctgatattcttaatttatgaaggaagggccccaaattttcattttgcactgggcccacaaataacgtagcaggtcccacaaacaaattcgtctagattcagagggccccttgccttcctcctctgctcacattcgttcctttctcccatcacaggcgggtaccctaccttgggggatttgccccagaataagccttttttttcccttctaacattttaatgaaaaatttcaagtgtatagcaatgttgaaaagattttatagtgagcacccatacacctgccacccaaagtctaccattaatgtcttctggacttacttttgccgtcttattcatactctgcctggactgtcctcagctacaggactcacatctcttgccgacagctctaaggcttccagtcctgctgtctggaccaagaaaggcttcctgggctctgagtgtcaaatggcggccttcaaggaaggggaatggtggaaaaggccgtggggggttttggagaaattgctagggaaagactggcaccagagttccaccagcccaggcaatggggggtacagaacccataagatgagttctagaaaagcaaggaaggtttcgttctggagtttgtggactgaggtttccatttgtgactaggattctcattggttccttatgtagtttcttacgccctgcatagtcttctaagcatttctcacagacgtggtctgggggcgaacaccagcagccctgagaggtggctaaagaggagattcttctctccacttcacatcgtaggaaactgagtctcagaggttccttccctggcctgcccacaaccccagggctaaaagaggcagaccaagcccagggccttgaaccccaacaatgggcctctttcttttgatcccatgataggggtgcaaaagcattgcattcccctgggtaatttgaagaaaaaacccaaaaaactccaactttgtctccaggaaaaagagggtgtctgggctatgatttacctctgagggtgtggttgcactgagcgtgatcacacttcaaagggttagatctcatttctctgcctttctagcttgggcccagggctcagaaatgtgtggactccctcacagcccctcccagcatccctgccccctcccaactgccttgggcaggtgacacctgtattattgctaagggttaaaaagcccccaaatcaataaaacccattaatgagtgttggtacctcgaaggctacagataaatcccttctactcagtgagttcaatcccataaaacagctctcccctttcaatcctagcattcatttgatagaaaatgtggagaaattttaaaaaggtgacttactaattgcctgtaaaataaaaggcagatggaagctttattacagttgaaggaagtcgggaatattaaggtaaaatgtcaaataacaattgattttccttagacataaaggggcgatttatggcttcctagttactacaaacgagaaattatttgaagttctgaaaagtatgaggagaaataaagattaaatagaagatgaaatcatagggatttctctgggaggtgacttcagtgcccctggggactagaattcatgtggccagtggcctagccagctggggcttggcagtttcaagatttagaggcaaggtgtctctgaggagcggggaagtggctgtttgctttgtgtctgaggaactaggaaagaaagatgaagatagggaaagttgtggttagggccaatttcagactgagggatgtgggattaggggattcttgtggatgggcctatagctctgcttcctgactagcagatactggggatctggggaagggaagggtgagctgcctttcctgggacttcgatggcatccttacagtcaggggacactgtccttgctgggtcccggacatcagtgtctatgtatccctgcaagccacagcactatccaggccctctggtggctttgcttggtctgggccaacctggtctccacactgacagtcaaagacgaggagaggaaaaagaactcacggctaggcgtggtggctcctgcctgtaattccagcactttgagaggccgaggcgggtggatcccttgagcccaggagtttgagaccagcctgggcaacatggcgaaatccccgtctctacaaaaaatagagaacaattacccaggaatggtggtactctggaggttgaggtgggaagatggcttgagctcgggaggttgaggctacagtgagctgtgattgtgccaccgcactccagcatgggcgacagagcaagacactgtctcaaaaaaaaggctcatttccaggctgccaggcttatgttagcctggggtcccgcaggagctgacctgagacaagtacttgagggcaagttgtttgtttgagggatgctcacaggaagctccagtaggagggtagggaggtgacccagggaaggaaggcagcttacaggggcgtgttgtcaggaagggcaccccggcgggtgacggaagcttaattttgctgggaaactcaggagccagcatggaacctgcacctcagagttatcccactggaaggatgagggagcgggtacttatacaccaactccatccccgtcctttgttaaggctgctggatggagtgggtgggacactcattcttcagcactcccaggggccctcaggctgtcagaagttaggtccgttgggctccaggatgaggggacccccagaagatgcgggagggcgtccgcagcatctgcctctgtgctttccctgtttatctgaatcctcataattcccgccacatgcagatcagagcccccagctttatggaagagaacacaggtttggagaagataaagagcattcccacaactaggaggtggggaaagctaggagttcagcccagagctccctgacttcaaagtccattctctttctacttcctgattttttttttttttttttttttttgagacggagtttcactctgttgtctaggctggggtgcagtggcacaaacttggctcactgcagtctctgcctcctgggttcaagcaattctcctgcctcagcctctcgagtagctgggactacaggcgcccgctaccatgcctggctaattttttgtgtttttaatagagacagggtttcaccgtgttggccaggctggtctcgaactcctgacctcaggtgatccgcttgccttggcctcccaaagtgctgggattacaagcacgagccactgtgctcggcctacttcctgatttttgtataagacacatcccagcagcatggtagactgaagactcctgggcccactctcagagattctgctctggcaaggatgtgtttattggtgagaggggtgtccaggaatacgtgcctttttttttttttctagagacagggtctcgttgtccaggctggagtgcagtggtgcaatcatagcttactgcaatctcaaacttctgggttcgagcgatcctcctatctcagcctcctaagtagctgggactacaggtgcacgccaccatgtctggctaatttttaaattttttctggagttggggtcttgtgatgttgcccaggctgatctttaacttcaggtctcaagagatcctcccaccttggcctcccaaatttttgggattacagccatgagccactatgcccaactagaatatgcacttttttttttttgagaccgagttttgctcttgttgcccaggctggagtataatggtgcgatctcggctcaccgcaacctccccctcccaggtccaagcgattcttctgcctcagcctcctgaggagctgggattacaggcatgtgccaccataccaggctaattttgtatttttagtagagatggggtttcttcgtgttggtcaggctggtcttgaactcctgacctcaggtgatcagccccgcctgctttggcctcccaaagtgctaggattacaggcatgagccaccaagcctgacctttttttttttttttgagacagagtcttgctttgtcacccaggctggagtgcagtggcacgatctcggctcactgcaagctctgcctcccaggttcatgccattctcctgcctcaggctcccaagtagctgggactacaggcacttgccaccacgcccggctaattttttgtatttttagtagagatggggtttcaccgtgttagccaggatggtcttgatttcctgacctcgtgatccacctgccttggcctcccaaagtgctgggattataggcgtgagccaccgtgcccggccttttttttttttttttttttttttgagacaggatcttgcttggttgcccaggctggagtgcagtggcctgattacagctcactgcagcctcaatctcctggactcaagcaatcctctcacctcagcctcttgagtagctgggaccacaggtgtgtgctaccacacccagataatttttgtgctttttgtagagacagggtttcgacatgttgcccaggccggactaaaattcctgggctcaagtgatcctcctgcctcagcttcccaaagtgctgggattacaggtatgtgccatcgtcaccagccagaatatgcattttctttttttcagacggggtctcactctgttgcccaggctggagtgcagtggtgtgatctcagctcactgcaacctctgccttctgagttcaagcgattctcctgcctcagcctcccaagcagctaggattacaggtgtctgccacaacacccggctaatttttgcatttttagtaaagatggggtttcaccatgttggtcaggctgatcacaaactcccgactgcaagtgatccgcttacctcggcctcccaaagtgttaggattacaggcatgagccattgtgcctggccgaatatgcacttttaataagcatcagccaggctaggcaggccgggggccacactcgagaacatttgcaccacagccactggctacctgcccctttttccataaggttccactgccctctctcccctctatctgggtctgttcttcaggttcttccctgggagctctctgagtgacataactgtccccaagtgctgggagatggagagaggaatcaccagactggagcaggcccccagagcggagatgggaaggggaggctggtgttctgaggctcccgaggcagtgagaggtgaccggaggcagtgagaggtgaccgaagacagtggctgagaaccagggaggggctgcgggaaaaagccctgggtgcaagtcgctctttccttagcgtctttgagaggagggatggggaaaggtgaggtactagggaaaaccatctggaaggaggtcaggctgcagaaaagctgcaggagtctgggggactaagaaaacagtgggagaccccgctgcagcccagcacgtgagggtgagaacgtcatgaatgagggaagagcaggcagggggtggtggccttgtggcctctggagaggaggagccacatgactctggggtgatctggggtgaccctcagggtaagggtacctccctagcactgagtacagagggaagcctacactgccaggtgcagtttccctggcaatgcttctccttctaacactatgtgagtttcctagtgctgctgtaacaaactgccataaaccaagtggcttcagagaacacagacggactatgacagttgtggagggaagaagtttgaaaagcggggtgcccgcaggctgcagtgcttctgcaggctccagggagaatctggtccttgcctcttccagcctctagagcctgccgcactccttggctcatggccccgtgtcattgtagcctctgcttctgccatcacatctcctcctctgcctctcctgcctccctctgtcctttataagaacgcttttgagtatattggacccatctggatagtccaggataaatccctccatcctcatatccttaatttaatcacacctggaaggttccctttgccacataaggtaacatattcacattgggacagttaggggattgggatgtggacatcttttgaggtgggaagaaggagctggggttctttttaacatttttttgagacagggtctctgtcacctaggctggagtgcagtggtgtgattgagactcactgcagcagcctcaacctcctgggctcaagtgatcctcccacctcagcttcctgagtagctgggactacaggtgtgcaccaccatgcccagatgatttttgtattattttaatattttgtacacatggaggtcttttaatgctgcccaggctggactcaaactcctgggctcaagcaatcctcccgtcttagcctcccaaagtgctgggattacaggtgtgtgccaccagacccagcccggacctggggttcctgtctcatgtcagccttagcaatctgggtgaccctgggcaaggcctatcccctctctgggcctttgtttctccacctgtgcaatgaggctgttccctctggctccttcactctgagtttttcagttgggagaatatcttggcagggagcagaggtcggcgggggtggttgtcattccatttcagggcctctcagagtcctgccgtggtgtgcactgtgtgtgtgtttaattttctacatttggatgtgatcctaatccaataaatgcttaggagacttctatagaatagattaatttttactagaaaaaaatataattggctgatgttaaggctactgccctgacaaatctgccttggccatatatctgagaaggtaaaagacccgctacgcttgcacataaatatgccatcttccccacaggccctggagaagcaccccggggaggtttcccttggtgatttattcttcattaataagctctatgctatattaggatcagatttatgactctgcctttctaatatttctgacatttcatctgaaaagaattacaaatgaaatcttgaaactttgccacttctccctgctagtgctctggcactctgtgtccaaggggagatggtgggctggggagaccccaagaagcagggacagaggcatgtttctcagggaaaggagcgatcagcttgactttgggagagctttattcagtttgcaagcagcttgggaggtgagcggttcaggcgagaaggctgcagaccagaccacaagcccagcagcagcagtgatgcctgtaacatgtatgagatggtggcaggcacattcattcattcaacagctatttgttaagcactttactgtgtgccaaacactgtgctgcttggtgcttgggatacaggaaagaataaaagtgaagcagtgatgaagatcttggccttcatgcatatggtgttctagcagaggtaggggagtgtcaagcactgatgaatgaaaatcctgaataggtaaaatatatcatatgttcacacgtggtaagggctatggcaaaacagaaacaaaccctccacacagggaaaagggaaccaagagtgccgggtggtcaagttgcaatgttaattaagaaagcacttcaactcatcaactcaaggaaccgtattatccccattttacagatgaggacggaggctcagcgtggattaggagctacacaaagacacaaagggaactttgcacaacttgaaagtttgcaaagtgccgtctgagccattagtctcccttctccccactgactgccctaccacaatcacatggggaccataaaaatactgttgcctgggtcccgctcccctgaggctttgattcaattggtttggatgcagcctgggacttggcatgtgactcttgtggtgccaggactaagaatcttgtgtgaactcccagcacagcctctcaggcctctattttctcacctgcaagatgtgggtaaaaatattcaccctgtactgcaagaggatgtcaggagtgaaggcagaaacacagcaccagccctccaggacccccaacccctcccccaccccaatccttcacccctgttgtaccttctgacctcaaagtggctctgattatttcactcccacaggccactggctcagaggtatagagctcacctgtggcagatggagatgcggatctgaggcttctgatgctgccacacccagcggcgccccccaaattccgggcccctggatgacatctggtctgttcctgcagcatcagagcacaatagagccagccaccagtcccagccctgcctgcatcccatccattcctgggtgcctaaccccgaggatcccctggcagtatgatgcggacctgtcttggatcccagggatatgctggccacggggaggagccggaaaccaacctttgtgtcactgtgtagtgacaagtgcctttggaggtcacaatagccagtggtgatttctaccactgcccccagcagccaaggtggcagaggagccctgtcagtcacccccattctgttcatggtctcacggtgggctccacatggggggtggcagccctctcccccaccccacccgacccctttcgacagatagggtaatacaaatacaaataacaccaaaagattgagttgctgggcagaaagggaccaaaggccagtgtgtgtgtgaggggtgggggcagggcaggagaggagcagcaaaaggctgtgaccgcctggctgagcactggatactcactgaagggcagggaggcttcctggagaaggagacctggcaggggctgagggagtgatgccaggcatgggggtttggagggaccccaggcatggcatgcctccattcctccctgtgctatccactctatataaggggtgctgtgcagggagacagcttgcatccaagcagggaggcagggaggatgagaggcagagaggagcccagctgggttgatggaaagtctgggaaatgcaggaaatccaggagggggagaatgattccaagctgtggcctgtgatgggccttgaaaccaggtgtaggcacttggatctgatcgctggggagccagagctgcttcctgagcagcagaagggcaggatgcgaatcagactaggggcagtgggaggaactgagaggcctcaggtcaccggagaaaatgcacagggccgggaggcagagatgctcctgttttcttgctctggggctcaggacagtcagtcaccctgagcttcagactcagctcactcattttgcagagatcctgacggcgatgcttcaggatgatctgggaagagtcaatgaggtaaaatatgtgaaatatgccttgaaaactacaaaccacagcacatgttctgtttttgcttctgcttgatggactcagtgagatggtggggacaagaattagagaagcccatgaggaggccaaggggcaccaaatagacccaccaaggaccagtggggacttagagaaaggatgagtcagagagaaatgacaggagcagaaggcaggccttgtatggaggatgaaggtgaagatcatacaccattaaacttgagaaagaggcgggaggagctgccatttcttgagtctactggatgccagcagtagtgctgggcaagggcttaacaggtggggaaatcgaggcacagagaggttaagtagcttgcctaagatcacccagttagtaagtagcagagcctggcagcttaactccaaagtctttgtactaaagccagattttccaaatttgcccaactgtaagaatcacctgggcctgtaatcctagcattttgggaggctgaggtgggtggatcacctgaggtcaggagtttgagaccagcctggccaacatggtgaaaccctgtctctactaaaaatacaaacaattagccgggcgtggtggcaggtgcctgtaatcctgtaatcccagctacttgggaggctgaggcaggagaattgcttgaaccccaaaggtggaggttgcagtgagctgagattgcgccatcgcactccagcctgggcaacaagagagaaacgccatctcaaaaaaataaaagcccgggagtttattacagatgcatattcccaggcccctcctacggaggttttgagttagtgagtccaaggccttctgcctcttcccaatgtattcattatgcaccatcattactcttgttcagatacaatgtgagtgatagcttgtctctggcagcacagcagccacacccaaccaatccagacctcagtcatgagggtgccaatcacagctaacatttttttttttgagacggagtcttgctctgtcgcccaggctggagtgcagtggcacgatcttggttcactgcagcctctgcctcctgggttcaagcgattctcctgcctcagcctcctaagtagctgggattacaggcacctgccaccatgcccggctaattgtatttttagtagagatgggggtttcactatgttggccaggctggccttgaactcctgaccttgtgagccacctgcctcagcttcccaaagtgctgggattacaggtgtgagccaccgcacctggcccacatagctaacatttaatcagcacatacagggccatgctcatcattttttgcgcacaatgccatttaaccttcacaacagcctgtgagaaggtgtgttagcctcattttacagaggaagaaactaaggcccagagaagttatgcaacttgcccaaggacacacagcttgaaggagctgaggtttaacccgtttctacggggtctgaatcctccttaccacccctatctcccctgactcccaggttgtgtttggtgtacttgggtagtgtccagctgacaaatgagatgttttagcttcagacagtctatgccatgtagaaatgcacccaggactgtgcatattagggaggtttgcaaatgtgtccacattagataatttttctcaaaatgcccctcactgaacttctgtcatgcagtatgtactgagcacctgcctcttgctaggtcccgggagagaggatgaagagggcagagcccccaccctcaggggacctgaaaaatgggagtcctttgtgctcatggaagcagggccttggggcctcagcactatggacatttggggccgggtaattctttgttgtggggggctgtcctgtagattgcaggatgctccgccgcatcccttgcccctgccctctagaagccagtagcaccctccagttgtgaaagccgtaaaatgtctccagacattgctcccagttgagagccacttcattaaagaaaaaaaaataaaaaagatttctgtatcctctatacatggactgaatttcactgacatttctctaaaataactgaatctatttctatactcatttttttttaccagctgccattttatttatttttcttttctttctttttttaagaaacagggtctcactctgtcacccaggctggagtgcagtggcgcaattatggctcactgcagcctcgacctcctgggctcaagcaatcctcccaccttagcgtccccagtagctggcacgccactgtgcccggctatttattttattttattttattttttttgtggagacagggtctcccaatgttgttcaggctggtctcaaactcctgggtttaagcaattcttctgccttcatttcccagagtgttaggattgcaggcgtgagccactgcacccggccattttatttcttaacaaagcacaaatcaaatgtacaatgcagctagattttcctttataaataatgtctaatggatttgtttctgtcagctgcctagaacattctggtatcccagacagaagtgcaacaccaggtggaggtgttgcagctgagaagttctgaccagcataccagcacccccttaaaagctgtctatacttgcggttctcagctaggctgccacagaatcgcccaagtcttaaaaaaacaggtctctgtcctactgcttgagatgctggttctctaggtctgaggttctggcacctgtgtgtttttaaaactttacaaataatttaaaagcgccttcaagtccacaacaacagaatatttccctccactcctcattgtcctggagttctctaacagtgcagttctacaactggacacacgatgtcgcttttcagccacagttctcactaagcggccccacagggcggcaggtgccttctgcagagagagagagagggccttggctgacaggccaagaccgggcatcctggctcctcctctgtacagacttttcacagatgtgaactctccctactccctgtcttctgcccccaaatgaagcctctcagctggcaagagctgagaactaccaagcgagccattgctaatttctattgtgtttggaaccacaaaaggcagaattattaaggctgtaaaggacctcagagcatctggtgcagtgagtttccaacttgtgaaaatctgatgtgatctcggacaagtcacttaaccccctgcctcaatttcttcatctgtaaaataggataggaatatatcttgcccgtctgattgttatgaagacaaagagaacaaatgcacataaagcccgtgaccatgtgctttgtgaatggaagctttaatttattcattcatttattttattatttatttttatttatttatttatttttgagacatagtctcgctctgttgcccaggctggagtgcaatggtgcgacctcggctcactgcaacctccatctcccggattcaaacaattctcctgcctcagccttctgagtagctgggattacaggtgcctgtcaccatggccagctagtttttgtatttttagtagagactgggtttcaccatgttggccagggtggtctcaaactcctgacctcgtgatctgcccgctttggcctcccaaaggaagcttttatttttattatagttttacataaggataaattcagccttagtgaagggaagtgacttgcccaagatcatacagtgagactgctggatctggggctctacttcagaatttttttttgagatggagtttcactctgttgcccaggctggagtgcagtggcacaatctcggctcactgcaacctccacctcccgggttcaagcgattctcctgcctcagcatccctgatagctgggactacaggctcccaccaccacgcccagctaatttttatattttgagtagagacagggtttcaccatgttggccaggctggtctcaacctgcctggcctcccagagtgctgagattacaggtgtgagccaccacgccagtctactgccattgtccatgatttttcctacagggaaaatcacaatcccagaagataagacaaagaacagtaaaaggtggcttttgaggcagtgagttctacctgaaggtgggaacagcccagagtgtctggggacagagtggtaaattctaatcaagccttcccatggctttgtggatgaggatgagtttctaccctgaagctcggcctgttcagccataaaatcaggataatggtggctgtgcctccttagagtagaatgagaatcagagcagaacaagggaaagctgcagtgacttgtcaggtgtcaaccttcagcatgatgggagagccatgggacccttcccctttccctaagagagccagccctcacagcaggcctgggatccaatgcccagcacccagctgggagcccagggaccttggccaaaatctggttctgcttcaacttggtgcccggcctttgtcaagtcacttcctcatttgcaaactgggagagtttggatgaaactattgaatgaaattattttgggggtttctttctggctctcacagtcctcgcatgctcaccatgttcccttcaatttcattagcacagcccaacaaagggttaagcagtggcagttcctctcgttctttggttaggacaggaaggtcaggggtgaggccaatacaagaggtagccgccacagctgatgctggaaatgacaatagttctttcctagactcatatttgtcccctctccctgaagctttgcctgcagtgcccttgtaaagaagttggcaagaagcaggagtgaggctcagcccctctctgaaatggatacgccggttgctccccctcatggctggtctcatttgccttcttcatttttagacacattccaaacttttcagcaaattatagtgtttgccaactggccgtctggggcccaggagagatgctatttatagcgatgctgggatgctgccatcccagagcagcctggtaagaaacggagccagagtgcctgggagtggcgtcctgcaccctggggagaggccagggccctggagcagggtggcaaagctggtggcccgtggcaaggaccactggcacatcccctgcctgcctgggccctggggtctgtgcccataccccacacggggggctgcttccgtgctccttggagagacgatggtgctgtggggccactgagcacagtaaaggctaagacccaccataggtcagcccttgctcatgctgactgttgccccatttcccttcattctctcactcgttcattcctcagaatctgcatcctggttttgtcactacctggagttgtaaagataccaccaagctcaccttgtggtgtgagccttgattttccccatctgtgtaaagggtggatctgagctccaaagttccttctagtcatatgcagagtgcataataaatgtgtttgtattcccactgtgctcagtgggcactggggcatgcagaagagaaattggaataaatgtgacccttgtcctccagaggctcagtaccagactggaaccaggacccagatgaggggcctacccagagagggcagcgtgctctcctatttgtgttaggcgttaccatttacaaagggctttacggctttgaaggtccccacaacgccctgaggaggtgaagtgtggcaatgcccgttcacttgggaaaatactgcatctcagagagaccaagggactcgcttaaggtcacacagatacagtaagtaagtagggaaagagctggggcctctgggctccttttccggggctctggcctcggttttaacccgttctcctagacctctcagtctctgggcctcccctctgtgttccccacccccactttccatcaagagctcagttctcttaagttctatattctctcttccccacccctagaaatctctgcccgcttccagaaaaggctttgattccgtcatttttggcatttcccacccaggaatcaaggctgcctcctctgtgaggaaggcgtgtggaaggcgagcagctgaggacacctctttttaagagaagcttctccatgttcttagccaggttatataacttcttttgcttctttcttttccacattctacatatttttcacaatgaggatgtgtcacttctatagttaaaaatggaaatcttcatttaaaagaacaatcagacacaaggcaaggtatgcttaccttcccaatgaccaaggagcagggagacattggtcgtggaggccataggtgaccagccttgagggaagggaaggaaggggaggtgcagggaggcgcagcagaggcacccgagtgtgctctacgaatgtaagtctgccagctgctcctctgtgcctagcaccctggaaagcgcccgcacacagtgggccctcagcaaactcccactgagcaaagggccctgtgagtaaggacctagaagcagggtgtgcttgaggcatggggtgggagggcatccagcttggctggcggtgggagccgatgcaaaggtgagctgagaccagacggtagaagaccttcagtgctgggccgaggagggttccttcatcccatagagaagagctgccatccaagacagaaggctggggagtgacatgttgaaatcagtatcttaggaaaataaagccactggctgggccactggctcccctttgtagaggggtctacgaagctcccgaggtttcagatagtccctgagagcccttcccctcgcgatgggctccgtttgaggcatgtccagtgtgaaaggaccacaggccacctgagggacaggaccaagcagagagctagtgacagaatgcccagggctccaagacagggctggagaggtgggagtggtccccaccttgagagccaaaggggctgagggctgagggttgaaggccgagagccaggaaggtccaggggagcaaaagggggagcagagggggagctggaggtgttggggtggtgggtagagagccaagatagggaggggacaagagaggggagaatctcaaggaaaagcaggagcatgagactgagagaaggcccctggaacactggcttgaatgtggctgacattggcactgccagtactcatcccaaaccagggagctcagccagcgccctttctgcatgtccgctctttcatcagacagctaggaacaagttatacgagatgatgtccaagtccaataaatgtctaagtcctttccactggatctggccccagcctcctctctgaaccatctcctatcactccaccctatccctgctggctccttctgctccagccatacaggcttgctcctgggctcagcttgtgcctgcctggggagcctcgcgcttgctgtttcctccttgagaaattcctgccctggataactccttcccccacttccttcagatctctgctcccttatcagggggcttcccctggctgccctatctataacagccctgaccactcttttcctcttctcctgctttctttgtcttcctgttcttatcactaagacatcacacatgtcttagttggcttgtttatattctgtctccacccatcttagtcagctactgctgaaatgatgctgtgtaacaaaccaccccgatactcagaggctccaaacaagtgctgatctttctcatttgtgagtctgtgtgtcagcccgagcagggcagctccaggctatggcttgggtttgggtggactccatgtctctctccattctccttggaccagcagctccctggggcacatgcttgtcttggagaatggcaggaacttaaaagccaagccaaacctcacagcacggttaagggtgatcatgacacaccgctaacattctagtggccaaagaagtctcatggccaagtgtaatagcagtggattgggcaagtttactctcttacacctgttgtgaaggggagtgggaggggatgggggggtgaccgttttcacaacaacagtgcaaactatcccatctcccaatagaacataaacaccttaaggttggaactgggtctgtatccccagcacttaaaatagtttttggcatacagtaagggtgcaatagacatttgttaaataaatatacagactaaccaattagcataatacagatgacaaaggtgtctctcttctgccagcttctgtgcctgaaatgttgatgatctcctccctatcttcctaacatctctcctgtccccacctgtccatgcccagggtttggctgctgtgacagaagtgtgagagcctcctgtctcccttgggatcccagtaagagcttccatgcctctctccctgctcacctgggctcccatccctggggaccttctggaaacagcttccagggctcccagagcttacttagccagattctacatctggctccagctgttatcctaagcttggccttgttttctgatctgaccacagcttcatcactcctacctgactgtgggattctagcccccagtggggtgggggaccaagggtgacaattacctgggaccttgactattgaaaggctaatcaggtttgattgggaaaaaagagttgctaaaaaggattgtattggataattggtgagatttgaacatggattttatattagtattgtgttattacattttctgatattagtcattcttttttttttttttttttgacggagtttgctctgtcaccaggctggagtgcaatagtgtgatctcggctcactgcaacctctgccacccgggttcaagcgattcccctgcttcggcctcctgagtagctgggactacaggcgggtgccaccacacccagcttgtttttgtacttttagtagagacagggtttcaacatgttggccaggatggtctcgatctcttgacctcgtgatctgcccgcctcagcctcccaaagtgctgggattacaggcatgagtcaccgctcccggccgttagtcattcttataggtatgtaagaaaatgtccttgaggtatttagcagggaagttcatgatctctgcagcttactcacaaatggttaaacagaatgagactaagaacagactagtaagaaaagactgaagaatataattattaggccaggtgcagtgactcacacctgtaaatcccaacattttgggaagctgagataggaggatcacttgaggccaggagtttgagaccagcctgggcaacatagtgagaccccatctctacaaaaaaaaaaaaaagtaaaaattacgtgggcacggtggtatacgcctgtacttccagcttcttgggaggctgaagtgggatgatcagaggacctcaggagtttgaggctgcagtgagctatgattgcagcactgcactccagccagggagacagactgaggcccggtctctaaaaaaaaaggaatctatgtgagtctatatattcgtgcaacttttctataggattgaaactctttaaaataagcttaataataaaaacaaaagctggtgggtgagacctttcatgtactctccaggagagttaagccccccaacattcctgtccccttgtttactctcaagcaccccctcccccacccaaggaccaggtctttgtttactgagcatctcagcgatgagctctcaccccctgatttcatcaattataaatgtgctcgctactcaccacacggcaatttgtgacggactgtggtttgtggtgagagtagcaccatccaagttcaccgcagccgcgagtagagatgagggttggggccagacacagggctgtgggggcggcaagggcacgcaggcagccctgccaccttcctgtttgtcagccaagtgaggcttccgagggcagcgggcgagcgggtcactactcagggccagctactgcggccaggccaggctagtcaggtctgtgcagccagaactagaggctccgccaggatgtgaggtctcccagctcctgggaactgaagcaaacactctgactaccccttcttgaagtgccttacggtgtatacatttgtttaatctgcacaacaaacctaggagcagttattgttactgtcctcattttgcagatgaggaaactgaggcaaagagaaattaagtaactccttcaaagtctggtaagtgacagaaccagattttaccctcttactcattgtccatattgccgagtaacttacattaatagatactatgcatgtttattttattttttatttttttttagagatggggtctcattcttttttttttttttttttgagacggagtctcgctctgtcgcccaggctggagtccagtggggcgtgatcttggctcactgcaagctccgcctccctggttcactccattctcctgcctcagcctcccgagtagctgggactacaggcacctgccaccacgcccggctaattttttgtatatttagtagagtcggggtttcaccgcgttagccagtatggtctcgatctcccgaactcgtgatccgcccacctcggcctcccaaagtgctgggattacaggcgtgagccaccgcgcccggtcctcattctttcactcagactggagtgccgtcgtgcaatctcagctcactgcagcctcaactcggggctcaagcaatcctgccacctcagcctcccgagtagctgggaccacaggcagtgccaccacacccaactaatttttgcattttttgtagagaccggcttttgccatgttgcccaggctggtctcgaactcctgagctcagacaatccacttgcctcggcctccaaaagtgctgggattacagcaccacgcccagccgatactatgcatgtttaactgacacctaatgattaggtagcaacaatttcttggctgccttattcaccttcatgacccccaacattgaaaatgtcttttcccatgtgaaagcatttgtgggctcctactgccaatctataaagtagaaatccttctgtggtacaaagccctctttcttatctaatttcccatttcccgttcccccttcccccttctgctaagagctcttccctacccacattgtaagtagggccggggagctaactccaccttgcgtactccaaatcaaccacatgacccaggcctgaccaatcagggctccaaatcctctagctatagtgattggtttagggagggacatgtgacccgcctgagccaatgaggatctgttctgggactcctgtttgaactcttgggaaaataaactccttatgttgggtggctgaggggatgaatgtgagctgggagctgcaagcaggcatcatgctattcccttcagctttcaagtagtgttttcactgctgttaacaattccaaatcttaagtgttccttgcatcttcctctcgccaaaaatattacagtactggagggcttacgtggtgtctcaaatgtctggagtttaaatctgccttgcagcttccatggccacagtgagtgtctgagtcctggccgctttctgctgatcccggggagagtttagcctgcctgcccttcctccctggttcgttctcatgtactcagatccctgcctcactcttctctcacacagacaacaaaagagagtcagattgtggtcttaagtgcacaggactctgaagttaggaccagaagaccttggttagagtctaaaccttgtcagttaccaaatatcattaggcacattagttaatctctctgaggcttatttccccatcagtaaagtgggtactgctgaagatgtagtctttagaagtgttctctagattgtaagccccgtgcttcctggttattgactaaacagggataaaaatgagtttctcctcacctgggtgtcattgagtttctggtcattgtgagatgggtgatgaagccaagggcatcaaacatcccaacaaggctgttttctgcatctccagggctatcccagcgttaatcacatatggacctttaatcagagtttgcagaataagtgagaattgtgtcagagtatgaatgtagatattatcttgttttagtcattgttactctaggggaccattcttactacaggaatattgcacaaaacccagaaatgtattgactttctcctaaccaaggcctaaagagctggtgttagacataggccaaggccagccagaggcccaaagcctgtttcccagggtaggactgccctggcctccccctctttctccccaggctccaccccagagagctgaagaccaggctgggtacggcactgctgagaaactgaggaaaatgccactggcctcctctctcactgcaggctgcccacccgggagggggaaagcttgtcactaaatcaggttcagttttggtcactgtcttggactggatattctagcatcagaactgagatgtttcttgtgacttaaagtaacttcaggactctattctacctaggattgggcagaaaagttatgggcctgcgggagttccaattcagaaacaggggagattacttgcactaaagaaagtctaaaggaaggtaggagacaaaaataaagttgtgtattgatgatcctaggagttatgcttgtttgacataccagttatacctgctgtcacggtagttatgcattaggggacccaggtgtctgaagttatatccagaagacttctgagggtgcaccggggggtcccttggctaaaagtgtgatttaaaccctaagagcctgcccagactatcagtcccagtttctacgtccactgtccctgaatctcgctgcttcttccttaggctgctgggagtctgaaccctcccccgccaacacccctcccccatgcctcagtcgtgggaagggggggcccttgagcagtagggccaagccctgttcagcctgggaccaagttcccatcaacaaggtggtctgggcagtggccagccagaaagcagtaattactgtcgaggtgcagggaccccaggtagggcccccacctcccacctctgtgtgggcagtgaatgggcctgcccctgggtaaggctgtgtcagcaggcgcctgcccaccccttgctgggttcccaggcccctagagccctctcgtaataggagccatttgcgctgtaaccagtgggtgaccagatttttaatcttggagaccccttggatcccaggcgggaagtgggatttgtcaaatggggagaggcggggctgtctgggaatgccagacggggttgtgctggggaaatatgtctcctttccatacagcccccttcccatacctccagcctccctctaccccgcaagtcagctctgtagctcctaggaggtatctccaacatgcttagctgttgaaagtaaatgaatgccggaagttgaaatctgaatggcttgttttgcactaactcaggtgcatgccaaataggggtgtctctttgcttgatcctaatccttcctcctctgaaatcctttctgacctgctgcctatcagcaattgccctgcaaagaccctctagctggccgcgggagaagctgtgttcttggctatcaggagtgagaacactggacccaagcttgcctattctctgccacaactcactgtgtgatcttggacaagtcacttcctttctttcagcctcagtttcaggagacttggcacttgctgagtgccaatgtgtgccatgttcttgacaagtatggtcccacacaaccttgccaatgaccctgtgacctatgtcttcttgttcccagtttacaggagagaagatgcagcctgggagagatgcagcaggtgtctgaggccacacagcaagtcacccagggccaggatctgaagctgggtctctccagctccactgcctgggcactttctcctccacagcgaccttcaggtcatcatgaggagcctttcggactaaagctagagagctgggattccaacagttcagcaacccatgacttctccatggcagctgctgcctgaccacctagtgcctttccactaagattgttccttccctctcctgaagattatcctcctgcccctctctcccaaacatctgcggtgtgcacctgctgcccaaagttgaacttttttttgttagagacagggcctcactgtgtcatccaggctggagtgcagtggcgtgatcatagctcactgcagcctccaactcctgggctcaagtgaccctctcacctcagcttcctgagtagctgggactacaggcatgcaccaccacgcctggctaatttttaaattttttgcagagacagggtctagctatgttgcccaccctggtcttgaactcctgggctcaagcaatctgtctgccttggtctcccagctcgctgggattacaggcatgaatcaccatgcccggtcctccaaagttgaacttttgagactcagtttccttcttggtaaattcaggctcctaggtgctacctcctcagagacatcctccttgaccacatcacatgacctctcgcagaggccagattctttaatgtattcatttgtctattatcatgtttccccagtagaagttgcacaaacggcaggggcttcatctgttttgtttgccgttatgtccttagcacctaaaattgtgcctggcacatatagtactcagtatgtatttgctgggtcaatgagtgagtgaatttatactaataacagcagctaccatttctagagtgtttaccatatattgggcactgtgtcaatcttcccaacaacccacagacgaagatcaattattacacccattgtacagatcaggaaactgagtcaggttaagaaacttgccctaaatcctacagtctcacttagaacttctgactgcagtgctcatcagaatgcattgtcaacccaaaggtcatttccagctcaggtggcttctatcaaaagagctcatcctggcctttccaagagccagacctccgacatcggtggagccctgtgcatagctggcctctcctgggcgtcttgtcccaagtacagagacctggatcctttcccactcatgtgcaacagcccaaaattaaaaacaaaagccatattaaaaaacaaaaccaactttctgccttaaaatattgtgagccagggggcaattagcaattatgctgtattttattatgagaagatagaattctaattggactgatttgaattccacacacctccacagattgttttgggaattaaggtatcagttgtatcggtaattatggtttaccattcaattacccccccacagaaaactgttaaattgtctgtgacggggcttaaatttagctcagacctatgtcctatgaagactgcgcgagtcaatacaagccatccggaaaccaccgggtgccctgtgccaggcggtaattaggggttgaggtttccaaagttttacctgagacagcagggacaagtgcctgggctgggcgtgctcacgtgggggggcttggatgctcccccagcacagtgctcttggctcctgccctgcgttgctggtgcaatagctgatcatctggaagacaatgtggtttcagccgcaagtgacattttggcgaggtgcaccagcatagaagccctgagacagcgagggaccatgtaaaactcacggacattgtaattggacacatctgggattgaattcccactcttccacttagggagtgaacttgagagggccacttaatatctttgagcctctgtttccccacctgtcaaatgggtacacctcctgcctcacacacgggttattgtgaagatggatggagaataataatggtgcctggcccaaattgcatttttttctctttttttagtactcactacatgccagatactttacaaacatctctaaacctcctaagccctatagggcaggcactgtggttattctctgttttatggatgggaaaactgagtcccagagaggttaaataacatgccgaaagtcccatgactatgaaatggggcagctgggatccaaacccaggtgacctagggccaaaccctaagcatgaagctgccctgctgggtgccttctgtacctgtccctctaagtggaagtgcctagaaatgacccagccaaaagcagcagactgtattttatcatttcaacaattctctctgtccataaaaagttctatgcagcttggccagttcctttttcctgaatacaaaactgagaatggtaacagggaactgactttttaatgtcatggtgcaaaggagctagctctgccatgacctccttgaagtgacctggtagagtgagggtaagacaagccacactccctaggctatggaggccactctccatggaggtaggggaatagggaatcctgcaaaatacagtctctggggatgggaaggatcagggaaggggccaggtgcagtagctcatgcctgtaatctcagcatttcgggaggctgaggtgggaggatcgcttgagcccaggagtttgagaccagcagtttgagaccagcctgagcaacatatcaagaccctgtctttacaaaaaattaacaaaaaggccaggcgtgatggctcacacctgtaaccccagtactttgagaggccgaggtgggcggatcacctgaggtcgggagtttgagaccagcctggccaacgtggtgaaactccgtctctactaaaaatacaaaaattagccaggtgtggtggctgtaataccagctactcgggaggctgaggcaggagaatcacttgaatccaggaggcagaggttgcagtgagcccagatcatgccactgcactccagcctgggagacagagtgagactccgtctcaaaaaaaaaaaaaacaattaacaaattagatgggtgtggtggtgcacagctgtagtcccagctactcaggaggctgaggtgaagggatcacttgatccaggtgttcgaggctatagtaagctgtgatcaccccactgcactccagcctgggtgacagagtgagatcttgtctcaaaaaaaaaaaatttttttttttaaaggatcagggtaggtacatggactcctcctattccttctggcaccatcagtggttgaacacacaaactttggttcaaatcctgcctcttccaatttgctagctgtgtgaccttgaaaaagttacttaacccctcttatccttagtttcctcatcttcagaataaaaatagtgcttgcctgatgggggagatgatggatgtaaagggcctcatagagggcttggcatttaccaagtgtttgagaaatattggctgtttttattcaaggcctgctcattgctagcatgagctacctgcaacagccacctctaggcctcttttgcttcctatattccagccacaccaagaaaccatgatggcctgaatcctctctgactttgtcaggcctccgtgcctttatacatgctgttccttctgcctagaaggcctttctcttttttcaacctccttgagtccattttagtccctgccagatggtcacttctctgtgatgctgccctaactccttggcagccatgctgctcccttgaccattcactagcccctttaattcagccccagccacagtgaggattaaatgggatgatgtctgagaaagcccatgggcaagaacctggcatggagtggtgccccataaatgatgaatggagctggggttgctttctcagccagctgcctggcaggggcctggcttcctcatcttcacacgtcagtgcctagagtaacacctggcacacagtgaacacaatctcagtaactgttagacatttgtcttttggggagctgctcagcctcccacattggggtgtgggttttttgttttgttttgttttgttttttgagacggagtttcattcttgttgcccaggctggagtgcaatggtgcgatcttggctcactgcagcctccgctgcctgggttcaagtgattctcctacctcagcctcccgagtagtagctgggattacaggcacgtgccaccatgcctggctaatgttttgtatttttagtagagacaggatttcaccatgttggtcaggctggtcttgaactcctgacctcaggtgatccacccgccttggcctcccaaagtgctgagattataggcgtgagccaccacgcccggcctaggggtgtggggtcttttaccgagtaggcctggtgggggaagtcagggaccccaccacaaaagttggagaggccacatcctcccacctccatctggggttagacatgtgacccaggcttggccaatcggatgttcctccatcttgcccagaattcacactcagcagtggtcttcacgaggggtggtagtggtggccagtaggagcagggctgggcagcctccctaacccacgttcatgagacttgaagctggctggtttcctgtcccctggcctcccttgcccattcccatcctggtgctccctccctatggactccttttgctcataaatatccttccaattaattgctttgctgcttcttagctagtgttgtttctgtcacttgcaaccaagagcctattcaggtgcaggaagggttgaatgaacaatggaaatggatcaacacatgtttctgagcatgtgctgacaggcaggccctgggcggagtaccacggtgttcaaatgatgtgtaagatgtgggcagtgccccggggggtctatggggagacagaccatgcatgacatcataaacaagaccacattataaagtggggtttagttggaccttgcagacacccagagaagacgactttgagccctcattggatggtgccatcgcaaagtacaaaacgaattgggttgtaggaactggaggcactgggacaatattccagattagggattgagctgaaggggttggaaatggctgagtagggtggtggaaagggatgcctgctagtaggcaattgtcttagtctgttttgtgctgctgtaatggattaccacagactgggtaatttataacaaacagaaatttatttggctcatggttctgaaggatgggaaatccaaaatcaaggagccggcatctggtgagggccttcttgttgcatcataacatgccagagggtgtcacatggtggaagggcaaagagagggagaaagggaaagagagggagcaggaaagggcaaacccactcccatgataataagctcactcatatcatgagtcattcatccatcgtgagggcagggtccacctcccaataccatcacaatggcaactaaacctcaacatgatttttggagaggacaaacattcaaaccatggcagcagcgtttgtgggaaacacgagccaaagcaagaaaagaccaacctaagagtgagtgacttggctcctcattctacattcattttcatccaatggggcccaagggcatgtacccattacccatctgggcagttcccttgaatgtgggcttctgtttgcccgtggaggtgaggaacttcaaggaagaaaccatgaaagacctcttgaggctgagggctggcaccagcaccaagatctccaggcagctggaacagtgatggctcctccgtcctcgcaggcggggcacccaacagggtgtgaccgtcacctgaggggagacagccagaggcacaggcctgatcctgggactgaggttggcggtttgggtggagaggtgattctgagtgtgacaccctccagtgataaagtggggggcttcccagcagcccctggggaaacaggctgcatctctggagacaggagatatgtggaggcctgaggggcagtggaaagccctgtgtgtctgggtcaggtctctccttggcaggtaatggtttgtcccagtagttttcagactccccatcctgccctgtccttctcctgtctgatgctcagacctgtcactcccagctcagcccccaccttactgtctacccctcagagtccctcccaccaagggcaccttctgtcccacatctccatggtgcagtcatgggaggagaacttgggagcataagaaactccaccaagttggggccaggcatggtggctcacgcctgtaatcccagcactttgggaggccgaggctggtgaatcacaaggtcaggagtttgagaccagcctgaccaacataatgaaatcccgtctctattaaaaatgcaaaaaattagccgggcatggtggcaggtgcctgtaatcccagctactcacgaggctgaggcaggagaatcacttgaaccgggaggcagaggatgcagtgagccaagatcgcgccattgcactccagcctgggtggcagtgaaagacttggtctcaaaaaaaaaaaaaagaaagaaagaaaaaaaaagaaactccaccaagggcttttgggtcctagggacagcaatgatgtggctggtccagccagaacctcattttgtcagtaaagttgggacccatattccctaagagatttgtcccaagaacacatgggttgctacagcggaggagaaatcaagtctgttttccctctggtgaattgtcccctgaacgtgctttcttcctacagtgttgccaggaaagtaaaaaaaaaaaaaaaaaaaaaaaaaaagtccacgatgtcagctggggtgataccaaaacaattgtgggaggaacaacatccgcaaattgaatagtgtgaggagtgtggacagaagatgttttgtctttggcctcatctcccagacttgatctttgtaaatacagaagtttccaccagagccgaacctggcaatgacttgaggagcagctgcaaggaagacagcctctcccagggtatcacctgggggcacaccccagcttcccctcctgagcctcatcgaggggttagtgctacctctcgggaaaacataaagatgacaagaagccaaaggtgccaatagttcccatttagtataaaagctggctcagcaaatcatgctatttcagggcctagggtgggccagttcccaggcagccctggcaggaaggactctgagaggcggacagtaaggtaggggcttgggagtgataggtctaaacatctgatggaagcaaaagggaggacaagggagggagtcaaaaaatccgggaagcctgtccttccagaaagtaccgacaccagggtgaggtggatcccagcacccgcacctctgaatggcctttcccctgcacccctatcccgcccccactcggagctaccccaagcacctgttcctctgggccccaaggtgacgccctttgtgtgtgtataggaaaggacggtgtacacatttggttagttccttcttttacaccataaattatcagagacaacccttttggaaagcaatttggcaataatatcaagtgacataaagatgttcatagcctttggcccaataatcttcctcctgggaattaatcctaagaaaataattcacaaggaagaaagaaccattttgtatctacaaagacatttattggggtgttatttatgatagggaaaaactggagacaccctccccagccaacatagagggatggtcctataaattatgatacatccatccaatgaaatgttaccctgccagtaaaaatggtaaattgaaaattgtgtagcaacaagaaagagtgttcagaaaataaaagcaagtgaaaaaaggagcacaggattgtctatatgctgtgatcaatggcaatgctgacaaatccatgtatgtgtagatagttgtagtgttacctgtaaggcacgataaggcggatgtaactgtgcttcaaatgttcttttccatagctgtggagtccttctagtatgaaatcatttttgtaaaatcgcaatttgtcaccaggggttttgactttccttattgcctcgtgggaggtggcagaggcagcacatctcagaccgagcctcggttcctccccctacctcccaccgctgcgcttgaagaaagatgctgcagcctccccagtccccatgccagcgctcccacttttctctgagctttcggtggcagacagcgccttgggcactttttcatgctcataattcgaattacctgtttaagtcggtcaaatgaaaaaataccagctccgcccccacgcgggctggccggggcgcctggagcgccagggcggctgcagcgcgctctccgcggccgtcggccctgagctcatttcctggggcgcgcgcgccgggctatttcagcctggcgctgtgcaaacaggacaatttactgcggccaaaagggacccaaattacaatcgtatcacagacaaatatccgccacgccaggtctccaggggccaggaggggcctctctcccggcgcggggggcgggcgcggggtcaggcaggtccgcggggctcggctcggcctcgccgtgccctgatcggcgtttgccaccgagctgtgcctgctctctgcaacaggaaggggcccagctcccccgggcgaccgttcctatctgagttctcgttcctatctgggttttcgtgcagaaaaacttcatctcttcccagggattttcccctgatttagggtccccttttatttggtttcttttcagcacttgggatgaaaacatccctccatccagccactccagggctcaaagtcatatctcctcgttcagaaacctcagtgcctgtccaccactcttccggaaaagtcggaatccttagtgtgatggtcaaagaccgctcttggtccagtccacctgtccagggccagcccctgtacccagatgctccaaccacggagagcacatcagactttcacaattttatccttgacaattgccttttcatcctgcctaaatgttcccttgtttctttctgcctagtgagctcttattccttctttaagacccagatacacatcacctcttccatgaagccttcccagacttcccctttccctgcttgacatctgccttccaagcagagtcagccccttttccttcctagcaccgtgcagaggtagatggtacttctcacatcctgtaattaattgcttgcatgcctgtggtacaccgtaccattgctcacaaatatttcctcttcctctctggagaaggattacacttccttgatccattggcctcactcaggcttcgccacatgactggtgctggccagtgaagtgggacatgtgagttactggggagcagaaactttcaaagccaagcatggctcaccttgttctctcttccctctgttacaaggatggcagtgccccagccagaaaccacactgccagcctggcataggagtggagcagggcacacataagtgtgagagaaatgaacttcacctcagtgctcgaggcccctgggaccatggactcatttgttactgcagcataaactagctggtcttgacttcagcttctgcctctcttccctggctttgccttcacaaaatcaagagtctgatcttactcatattatagagctggtcttcaaccatgttctttttttttttttcctttttttttttttgagatggagtttcgctcatgtagtccaggatggagtgcaatggtgcgatctgggctcactgcaatctctgcctccctggttcaagcgattctcctgcctcagcctcccaaatggctgggattacaggtgcttgccaccacgcctagctaatttttgtatttttagaagagataggatttcaccatgttggccaggctatctcaaactcctgacctcaggagatctgcccgcttcggcctcccaaagtgctggcattacaggcatgagccaccatgcccagccccatgttcttcgaatggccaagaatatcagtaggtaaggtttgttgagcatggattgtgtgccaggtgctgtgctatgcctttggcaagcgttatcccattacatcctttaacagcactctctggtgggtactgctcttatacaagatttacaaaagagaaaagagactcagaggaatgtaggggctcacgtgagattgtaaagtagtgagaagtggagctggtccttcagctcaaatccctctgatgccaaagaactcaaactctgcagttccatcatgtgcatcctcactctctcacttcctgcagaggatctgtggaggttgtaactattgttttcacctgtctcttccactgggctctgagctgcccgaagacagatcttttttttttttttgagacagaattttgctcttgttgcccaggctggagtgcaatggcacgatcttggctcaccacagcctctgcctcttgggttcaagcgattctcctgcctcagcctcccgagtaactgggattacaggcatgcgccaccatgcctggctacttttgtatttttagtagagacggggtttctctgtgttggtcaggctggtcttgaactcccgaccttaggtgatctgtctgtctcggcctcccaaagtgctgggattataggcgtgagccaccacgcccggccccgaagacagatcttaatcatctgatttcccatccattaattcagtctttcaccaaggatgtattgagtgccaattatatgccaggcatcatctgatgtgttggggacagagaaataaaacagataaaaatccctgctgttaattctagcctatggtgacaagaagcagatccgtggctgcctggggtgagtgtggggtaggaaatgggagaaatggggatgactgcaactttgggggtagtggaaaatgttcagtatcgtggtagtggtggtggctgtacaggtatatatatccgcatacatcccacagttcagaattatacactttaaatggtaaatggatacagtttattatatgtaaatgatccctcaattaagttgatttagaggaacctggccgggcgtggtggctcacacctagtattctcagcactttgggaggccgaggtgggcggatcatgaggtcaggagatagagaccatcctagctaacatggtgaaaacccatctctactaaaaacacgaaaacaaaaaattagccgggtgtggtggtgggcgcctgtagtcccagctactcgggacactgaacctgggaggcggagctggcagtgagctgagatcgcaccacttcactccagcctgggcaacagagcaagactctgccttgaaaaaaaaaaaaaaaaaagaacccttgctcttatggagaagcattctactggggaaaacagacaataaacacatagataaataaaacatatgtcagaaaggggtaagtgatgctcagaaaaataggacaagggatcagaagtgctaggcgttgcaatttaaaataatggggtctggaaagccaccctgagaagggccaatggagctatgcccagcctgtggtatccttcctcaggcaggggactgtacccccagcttacaagccttttcgaggcaccttcagggtttgagcccaaaatgcactgcacattaagtgttattgatgggcttgtggaaatctgctctccgtcaggctctgatgaaacttttccaacaggagactgaactcagtactgggcatggccccctgcacatagtaagtccacagcaaatgtgtgtggggtgaatactgtcttctttatcctccctttttctactccagtccaggtagacggtgtatctacccacccaattttgctgtttctggtaccctcagtgggtcttgcctgctcttcctccttgaaatcattactcagaggtctccgtgtcagctccagacagatgggcctggtgctcctttatctcaatacaattcccccgctcccaggctccaggggaaatcctgagctaactttggtctttcctaaactccacacttccctttgggcacctctttccccattgcggggctccctttcagaatttgctgctttatttatttatttatttttgtcagaggtgcattaatgatgctttatttaaaaacaaaaaacttggccaggcgcggtggcttatgcctgtaatcccagcactttgggaggctgaggtgggcggatcacaaggtcaggagatcaagaccatccagaccaacatggtgaaacccagtctgtactaaaaatacaaaaaaaaaaaaaaaaaaaaatcagccgggcgtggcacatgcctgtaattccagctactcaggaggctgaggcaggagaatcacttgaacccgggaggcagaggttgcagtgagccgagattgggccactgcactccagcctgggtgacagagcgagactccatctcaaacaaaaaaacaccacaaataaataaaaaataaaaacaaaaaaccaaaaacagtccattccatgtcgtgttgaaactgatcagtgtaagttaaatggtggtttttaggctggacccatgatttaagctgtacccatccagctcaaactgaaaaaaaaaaaaatcatttgaatgttaaagcaatcgttcagagtcttcaagaagaaaccaggcaggaaaatgccaataatgatgactggcaaaatcaaaatctaaaacaaataaactgtttatcaagctgccgacagaaaaagaaatcttgcatggagactacaagtctggattttctgggatgaaattgtacaggaatctcagtctacagtttcctcaatcgctgtggagatggagctgtcactgaatctgacagagccctgcactccccagtccgccgaccctttctgtaatccagtcttcactgtagcctgaggaactatttcaacctgctccttttttatcttcttctttggcacaacctcagtggacttctctgattcagaacaagttctaattgatcttctctgttgcttcttttctactgagcctgtagaaccagatgttgcttcaagagatgatatattctgcattggcttttcatttctctggtttggtttagaaattataagcctgtcttgccccctgacacttatttctgttttgttaccaattccctttgttgaataaacaaattaatttcccatcctctgtagcattctgaagagcaaacacttcttcaattttcacagctggagacatgttacacttctgcaaatccaggctccctttgtgcattgtaatggaagctggtaggatttccttgctgccacagttttccaggctattttaacaggaggtggctcttcctcgtccgcgcttgtgtgctgcctcgggctgtgtctccaaatgtcagtacttgagagtgaggaggccacctcccctgcattgatctgttctggctgagtttaaagcacagatcttggtcatcaggtttttttaacttcggctttggagacaacattctttttttttttttttttagatggagtctcgctctgtcgcccaggctggaatgcagtggtgcgatctccggttcatgccattctcctgcctcagcctcccaagtacctgggattacaggcgcccaccaccatgcccggctaatttttttgtatttttttagtagagacggggtttcaccgtgttagccaggatggtctcaatctcctgaccttgtgatccgcccgcctgggcctcccaaagtgctgggattacagacgtgagccaccgcgcccggccccaacattcttttttgcttgggataaaccctcttcaggctgttaatcaatatagataaaagtatactgttctattctttcttctcaagtcattttcaatgctttctctgcatgggcaatgccaaaatcccattgagcatgttctctctgaggtcagggtttccaaatcttttgtttctcagagtgattgctggcttgtttggttgcctcagccagtaattcttcataccgcttatgacctttatactcctgtacccatttttcatgaacccacaccctctctggctgtttgctaaaacactggacatgatattttcgggcacctcctgtgttaattttggtatgaacctccagctggggatcacttcaatccatacaaggccagcacggataggttcccaccttggaccacacaagatcaccaacttgaaacttaacaccagtggacacttctgttgttggaacagaagatagtattggctgaactggggcttcctcttttagtactggatcttcccttggtttttctgatatggtgtgaaccctctcatttggtctattttgttcctctggttctaatttggggattttgtgtgacttgcgctcttcagatcttgatgagtcatgctttttgggttttttcctcttttcttttctgctttcatgctttgacttcgtgtgctcacttgcctgtacttcatttaaaaggtctccacaaagggaagacttgaacaattccctgccattctggatagttttggttatttttagtttaacttcaggtgagccactcttctttggaatcacagtttgtggtaccgaagtggtggctgtggaggggaagggttttctagaatttaatgtggtcttctgtttagaatttctgaatggtaatagtcagtggggctaaagtttctagctgcgccaaagtcattggctgacccattaggatattgattatgcgactggtatttggtttgaatttcatacatgctgattgatggcaggtagccatttgtgagtggaggaagatctgttgtaggtgagtattgaaagctttgctgcaaggtagcttcgtatggtgtctggccaccatcttcagcaatgtcaattttgttatcaaaggcatcctcctgacggatgctggcggagtcagtgagttgaggtggttgttgaactgtgtttcccgtgatcccttgcatgaaagagaaagagaaatccattgttctgctccagcattcttaactttccctttctctcatcgggccttcagtttgtcccgttctaaccgcccggccgtctcaatgcgatcacaggagggacacggagatcgaggagggccacagccggaccaggccaggcgtgctgcggcaggaggaaggctccggaggtggggtgggaaggggaggccgagagacgggtgtcgccgcgcccccgctgccgccagagaggagcctacggctggcagcctggcctgggcagcagggtcctcggcgctcggctgggaaatcgcacgtctctccgcggtgacctgtgcacagcccctgggcctccgcctccgtgctggcagcctccgcctcagcgcacaaagccccgtcaccccgactctcggggcgccgccgccgccaaatcctcagcccctccctcattggccgcggcgtctgccgggaagtgcagtcccgggtttggggcgatggagcccaggaggaagcggcgagtcagcgcggcggaaagggcggaggggacggagggggcggaggggacgaaccacgaacgcccgcggccgcgagggtctggacgacaaaggagagactaggcgagagggcttgttgcttttttttttttttttttttttttttttttttttgagacggagtctcgctctgtcacccaggctggagtgcaatggcgcgatctcggctcgctgcaacctccgcctcccgggttcaagcgattctcctgcttcagcctccgaggagctgggattacgggggcgcgcctccacgcccagctaattctttgtacttttagtagagatggggtttcaccatgttggccaggctggtatcgaactcctgacctcgcgatccacccgccttggtgttgcacttttataactctttttaccttctcaccaaactagcatttaggaaaaaaaaaaaatcaacaaaaacaaaacaaaaaaaccaaaaacctctatcagtcatttacacgttagttggaaataatttagaccagtgtggctctccttcgcagaacacattcagtcctctgtgattattagaagcaaggttcaccttttgatcttggttaaagaaatttcaggctaaatttctggggaggagatgtatttcaggttccaggatcccagaattgctctgcacaagtcacagccatccttgttccctgaagtctctgttggctgcaccatgtctgctgctcctttatgagtggttttgggagaggccaggctgagctcttactagctccttgcaacaaaacaagcgaatgtgaaaagtcttaaacactcagctttctggtcagaggaaatcccaaaatcagcatgactcaggattttaagtgccccatagagtgtccaagagaagaaacctaggagtctagggtctttcaaaaccccaaagttaaaaccttttatcaccctttcctgaccttcctggcttaggattttaggcagcctcttggaggcctcccttgcctggggcacacttggccataaacccattcattcagccctactgatttagtgcccattatgtgccaggcagaggaaaagtagaaatggtaggatctatcttcaaggggctcaaagtctgcaggaaacaggatccgctaacaaattagagcacaagggtgtgccgagtgctataatagcagtgtgggttgctgttgagaaaatacagaggagggtaccaccagggagcttctatgagttgagctgagccttgaaggttgaagaggcatttctcacatagagaagacgaaatagtgccctgattgtatactaggaatgaaaacaccaagtgcttaccaagctcagataggtaacgtaaatgaatggagtaggtgagtaaagtagcagggattgtcagcggtggtggggaagtggaaggcctgcatcctgcctacagggcttctgctggaaagacagcctggcctggattcagcctccatttgcaccttctgctaggtgcttttgtgcagtgcacaactcacacaacctcacatggctgccctgcctgcctaagctggccatcagctgcttgttgccatactgaaaaagagggtttggttttgcctcgccttgctttttcaatagaagccagaaacttgaatttttatgtaaaaatttccaatttgtcaaatgccattgtagccaaacaaaaatctagcctcaggctggatccaccatagagtttcagtttgagaccccgatgggaaccagtcccctgggcacatgctgctctctctcctccataccatgcaacacagtcctttgctgagatttgacaagggaaacacagtcatagatgaaaccccctacagctgctgcaaagcccttcagaaacatgagattggcctctgaaccagaggaaagtaacgtggggctgtacaacagcagccagcctgtgagactgatggataaagctttaatttatcggtgcaccttgtttggagaaagcttccctgccctcttggctgcccccacctccaacccctcctgttttgctaatgataaatgacaagcagtggacatttattaattaaaccacccgctgtagccattggtaaaacccaaggccacatgcaggggaagcattcaaagcattcctgctgcccctgcccagggcacaggccccagggttatcctttgctggagagagcaggccacggcggccacagcctcacatgatgggccttcctaggatctgtctgggttctggctgataaatggaaatcacctccatgggccacacagtaattaaactcctggcattcttttgacaaaaaaaaagttcctcatgggacattcccacaagctgctgaaggtctgggccctgcaagctcccagctgattaccaaggagttttcgaagttggccttgactgaggatcaaaggaggatgggagttcagggaatgagggtgggggtgggaaatgccttagaattaagttgatgatggcctgttgcggtggcttatgcctctaatctcagtgctttgggaggctgaggcgggaaaatcacttgagcccaggagtttgagaccagcatggacaacatggtgagaccttttcttaacaaaaaatttaaaaattagcctggtgtggtggcacatgcctgtggtcccatctacacgaggaggctgaggtgctaggattgcttgagtccaggaggttgaggatgcagtgagctgtgtttgcaccactgcacttcagcctggtgaaggaggagaccctgagacagaaggagaccctgtctcaaaaaaaagttgatcatttggatgttcggcctgaaacacccacatttatttccccaggaccgagatgggcagagagataaaagcaggccttcaaggctcatttatttatatttctactgtttatttgttccactgatgtaccccaagtacctaaaacagagcctggaacatagtaggtgctcagtaaatatttgttgactgattagctggagatgtgctcatgtctttttaacgaaagcagtaatcaggagaaattcctaattaaggtcctagaaccagtggcttctaattgtttgctgccacaggattgtaaacatgttgaagatgaggccagtgtcttattcaattgactgtccccagaagcaggcacagtgcccagcctagggcctacacaccgtggtttctcaacgatatcaattgtctgaatgactcaggggtaaaccatttttcagtgctgggtcaggcagagccccactgggacgtgacctgcacacactttggcagtcccctgggatgcagtggtagcagcagcagagtcataaagcctggggatcagagccacactggatatcacagctggaaaggcctgagatctcagccagtcccttgctaagcagaaagaagaaatgaattagctacaaatcttggggcctctaaaaacacagcttcatttttctgtttctcctatagactccccattctgtccaactgccaaaaacatttaagtttatttaataatcaatgtcagctgaagttggtcatatcagacttaaattcaatctattcccagttgcctcaacttcccttgtcaggtcatctacttagttctagtggcttctgtgccataggagggggagctggaggagggggagagccgagccatggtcatcagtatctgtcttcactaacctcttgggcatggtcaccccattttgttggtgtctgctaaatccacatcttttttttctgtagtaattagcccacacactctgtgtcctcctgactctgcagctgaggccctcccagcccaccaggccctgcccagcaccttccatgccttccttggaagtgttggaaaactagctggcccctcatactatagggacccagggaagttctgattgaccctgggtgccatgatagaacaggactccacccactcagcattccagataaacagtggacacagtctcctttgcactcctattttcccaactggttgggaggattctgttggtgcctgctccccaccctattgggatctctgtctccctggtgagctgtgtatgtgcatgatggtgagggtctccagcaacaaggaaaggagttacatttgtccatattcacactgctataaagaaatacctgagactgggtaatttataaagaaaagaggtttaattgactcatagttccacatggctggggaagcctcaggaaacttacaatcatggcggaagggaaaaggcatgtcttacatggtggcaggtgagagagagtgtgtaggaagtgaagggggaagagcatcttataaaaccgtcagatctcctgagaactcactcactatcaccagaacagcatgggggaaccaccctcatgatccagtcacctcccagcagctctctccctcaacacctggaaattacaattcaagatgagacttgggtggggacacaaagcctgaccatatcagaggttgatcttgcagcattttattctctgaatgtcacatggggaaacggaggtcaagaaggtggaaaagacttgcctaaggccacacagcatgagtgagtgtgcctaaggccacacagcattgggccaagagcctgggacttggtaagcccctcctgagccctcctcctgagccaggccctgtctcaggttctagcacatgcaactgcaaccagcagggtatgtgtcatagtcttaaaatatggccacaaattctttgatgatcttcccattgagctgtggggtctatttctctcttttctttgaatattcgcagggttatgactgcttcaattaattgagtacagagaggtgatgctgtatgacttccaagcctaagtcatctcaggccatcagcttctgcctttgttaatggaacacttgcctttggagtcctgagcctccaggtaaaaagttcaactatcccaaggctaccatgctgtgaggaagcccaaactacacagaggggccatgtgaaggcactctggttgacagtccccactgagatgtctcagtccaggcaccaggcatgtgagggaagaagcccccaggtgatttcagccctcagcctttccagccacctctagccatttgagtcttcacaaccctggccctagacattggagagcagagacaggccaccctgttgggccctggccaaattcttaaacctctgaatctgtgagcctaataaaatggttgttgttttatgtcaccaactttggggtggcttgttacacagccacagatagctgtgccatcttaacctgctggattggtaccccttaagtctctgatatccatgcttctgcccggccactaatgaagccacatctgttcccaccagaagaccactgagaaggccagtgagtgtgtggtggggacccttgtttgaaggaagttgggtgaaggaagttgctgacatgcatgactgctaacaaaagaatatacatctgcggaggttgttctggaagtatcttagggaagtaaaggaaaggaattaagactcatcgacaacagactccattccttgccctgcccatccttattcatttattcaacaaggggtctatgagcaactacgaggtgccaggccctgtgttaagattctgggacatggacacaggcctggccctagtggttctcctagtccagctagagacaaacattaaacgatgattaatatacatactttgaatgaaaaacttagggtgttctgagagtgcgtggagacctatttaatcctcataatatccttctgaggtaggcaccatcctttctattttgcaggggaatactaaggctcagaggggttaagagaccttcccaaggtcacccagcaggggagacaccagattgcaaagaagcagcccccacccacctagtgaggccaggaaagcagaggcataaatgtccagctgagcatgagactccttgggccaacaggagcacggtggggtcagcaccctcagacaggcaacctctgagggagcagcattaacccctgggaagccagggtagcttgttaatccagcaaacctgcacttctcaagaaaaaatggccctctgttgggaaggaatgattgagctctaatcatctagcagtccctgggcagccacactcaccatctctataatgagggcagaaatagaaggcaagaggtatggtaaccatccagaggcagtgactgggactcctaaacccctccttgattctgagtccccaggggccagtggaggggcattgggaggtgagacaagacatgcagacaacccgcctccaagagatgtcatagagaagtgggcttcagaccttggggtgtggaagcacctggagaataggtgaaaacgctgatgcttggccccaccctgagggatttgggttcatttggtctggggcgaagcccgggcatctgtgggttttttttttttttttttttttgagacagtcttgctttgttgcccaggctggagtgcattggcatgatctgagctcactgcaacttctgcctcctgggttcaagcgattctcctgcctcagcctcctgagtagctgggattacaggcacctgctaacacacctggctaatttttgtattttgagtagagacggggtttcaccatgttggccaggctggtctggaactccagaactcaagcgatccgcctgcctcggcctcccaaagtgctaggattacaggcatgagccaccgtactctgccaaaaatatatatctttagattagcttttaatagagttcttcaaatacccaaaagattagggaaaactaggatgctaaaagatgaaataggtgactaggcaaataaatcattagggaaattggtttcaggctcatggtattgttccccacaatgctgggcaagttacttgtccattccaagtttcattttcccctacctgaacaatggagctaataaaattgatttcgccgggcgtggtgggtcatgcctgtaatcctagcatttgggaggccaaagtggggatggatcacctgaggtcaggagttcgagaccagcctggcccatgtggtgaaacctcatttctactaaaaaaaatacaaaaaattagccgggcatggtgtggcatgtctgtagtcccagttactcgggaggctgaggcagagaattgcttgaacttgggaggcggaggttgcagtgagccgagatcgcatcactgcactcagcctgggtgagtgcagagtgagtgagactctgcctaaaaaaaaaaaaaaaaaaatttcacagtgtagttttgaggacgttgtaagagggcgtgagttatgtgccaggtgggtggtaaacgttcaatagatgctactttccttccttcctgagcatttggaccacacagagacctccctgctcttggctttggctttaaggagcttgtggtcactgagaggattttgcactggaagtacatgcattcaaaatggatacctaagtgtatattttctggtgtaaactatatgtcgactctaactttagcccgggggagctttattatttgtctccctttcatgaaagctataatagaggaagagaaaaccctgcctcgcacattccgattcctaaatacataatttataattttctgggatattatttaagtttattttagttctggatacacaccatccccgtggggtgcttatttaagtatcgggtgggctctggaaaggcctggaatgcctcaaaaggagggaagaagattctttccattcattaaacagcagggcctggggtctttgcaggttctagggcttagaagtttccttaacaccaactgaggagtcccagggtgggagctgagctcacacgaagctctacttcgcgtgtcctgaagctttgacagttgggcctctttctggcttttgcatcctctgctcatactaaggccagcagagctacaggttggaccatggtctggccgggagctccagcttcctcttttcctctcagtagtcatcgggccagctgcccatacctggtgcccaggtatgagaagagacctttggctttcaccaggttcttgagagggtcagggacctccaaaaggataaatgccattggtcagatagtcactgtctacctccctcccatccatttcctgccttcaacccctgttcttgggacaaggccttcgctggcattcaatggcgggtccctgaggaaggccccagccttgccgaacatccttcaagggagacttcagcccctggccctgcagtgagtgtgttgttagcagcagaggggctgagtgaggcagtgggatggggcttttcttttttgttctggttgcaaattataaacccccaaatgctggagttccagactgaggttcacaaactttagagggcagaactaaagtcaaatgtgcttttaaaagcaccccaggagatgctgatgtgggtggacacttgaagaaacactggttgataaagtttctctctttcttttttttttgagatggagtctcgctctgcggcccaggctggagtacagtggggccatctcacctcaccacaacctccacctcccgggttcaagcaattctcctgcctcagcctcctgagtagctgggattacaggcgtgcgccaccatgaccagctaatttttgtatttttagtagagatgggatttcgccatgatggccaggctggtctcgaactcctgacctcaggtgatccgcctgtctcggcctcccaaagtgctgggattacaggtgtgagccaccacgcccagccatggttgatagtttctagaaagctgttccaagttactggctgtttttgaattgttcaagcttaaaaaaaagtaggcaccctttaggaaggccagtagaagtcccattcccaaggagggcaggcctgtgagcacgttaatggcaacagtggcagctaacaaccacttttgtagccctactgtgccccagacactgttctaagcactcataaacattaatctaaacctcccaagagccccacatgccaggacactcgtgcctctatttcaggaaaggccatctggatcttgcaggacggcaaatgggagaggacaaacagagccccataggtgaaaaggaggaacgagaggctggagaggaatggggagcattagagatcacaaaatgtggtagacagaataatggtccccagatgttcgcatccacatccctggaacttttgaacgttaccttatcttaccttatgtggcaaaagggactttgcaggtatgattacgttaagaatcctgacatgtgaagatcattctggattatccagattaatccaggtggattgggggaacccagtgtcatcacatttaagggtccttagatgtggaagataggggtagaagggtgagtcaagggagtgccatgagagaagatggaaggggtcacaagccgaggaatgcaggccacttctcggatccgcaaaaggcgaggatatgtggtctctccagataggagcacagccctgctggaacctggattttagccccatgagacccatcttacacttgtgacctttagagctgtaaggtcataaatttgtgttgctttaaggctctaagtttgtggtaatttgttgcagcagccatagaaaactagtagaaggaagaaaaggagcattaagagagatttcccactttgctttgaaaagtggctagaaatagatggggaaacggggagaagatggcccagagcggaacgggggagaaagtcttcttctatgactaaggaagagtgaggcttctaaacggccctcaggaaagtgtttgtgccatgatgcttttcaggagagagtagagatcaattgatctctgtgctgtgttcttacatgaaatatttgggagggaagtgttgtggtgagtcacttgtatttttttttaaatacctgccactcccagttttccagatagctgaggaaaggctggggttcaaatcccataaaaaaccaacatcattcaattggtacattctctaaaatgtacataagacatctaggaggacttcataatgattaagagcaatcaactgctaatgcagtgagtgcttattttttccaggcactgtaccaggcatgctgcttcatttaaattttgcagggacttttgaagtaggtcctaccttgatttccattttgcaagtgaaaagcatcacattgagatgtggcccttcagccttagccctttgatatggtttggctctgtgtctgcacccaaatctcattttgaattgtgctgccataattcccatgtgttgtgggagggacctggtgggagataattgaatcgtgggggcagtttcccccatactgttctcgtgatagtgaataagtctcacgagatcttatggttttatcaggggtttccactttagcgtcttcctcattctcactttgcctgctgccatccatgtaagacgggacttgctcctccttgctttctgccatgattatgaggcttccctaatcacatggaactgtaagtccaattaaacctctttcttttgtaaattgcccaatgtcaggtatgtctttattagcagtgtgaaaatggactaatagacccttcttcctccttgctaaaatacttttttgatggtgatcatgaattggcctttgcgtgcagtgagttttgactggtctgccaatgcctttcctttccagctatgaatggttttaaaaaatatcaatgacaaggccccacctcataaccattaaatgcaaaactctggtaggggcccaggtgtttcttttcttttcttttcttttcttttttttttttttttgagacggagtctctctctgtcgccagggtggagtgcagtggcacaatctcagctcactgcaacctccacctcccaggttcaagagattctcctgcttcagcctcccaagtagctgggactacaggtgcgtaccaccacgcctggctaattttctgtatttttagtagagatggagtttcaccttgttagccaggatggtctcaatctcctgacctcattatcctcccacctccgcctcccaaagtgctgggattacaggtgtgagccactgtgcccagctgggcccaggtgtttcttaaaagctctcaggtgattctaatgttgcagccagggatgagaccatttgtctaaggcaatctggataactcctttcccattagccagggattagcctgtgaactattctgaccaaggaggcatgaacttttctgtttctggatgttgtcatctgcaaataacaggaaggaacctaggatctgaagatgctgctgagctgcctgagtagctcacctggatccaccctatttctagacttcttgttatatggtgaataaatgtcctcctggtttaagacaagggttggcaaactatgacccaggagccaagtctggcccactgcttgattttgtaaataaagttttattggaatacagccatgcccatttgtttatgtattgtctacatattgtttagtgctacaatggcagggatgcatagtcacgacagagaccttatggcctgcaaagcctcaaatatttactctctggcccttggccctttgcagaaaaagtttgccagctcctggtctaagggtctttttgtgggcctttctattacttgcagttgagggtatctgttaatttgggagtttagcttccccaaggtggcattgttagtgatggcaagttttgccccctttaagccattttttcatgggagaataattacagaatgatctttaagggatttcaataatatcagccaatcctactgcccacggggaagtgggatcacacaggttggggcttcagataggcctggatttatggcctggttttatcatatagatccaattgtctttgaaaagtgacttcatcttctagtcctcaactttctcatctaaaatgaggacagttatatctacacgaaggatgggtaccctcatggaggcaattccagacaaagggatcagtgcaagcaaaggaagcgaggtgaaaaatctccaggtccacatggagagccgcaagctgctctgcctgacctaagccaagagcatagaaaaggggtcatggggcacactgtggtgaagataggctggcatttgttgcataataatttctccagttgtcttgggtttctgagaggtagcttctaaacccttggaatttcccaagtgataggaatgtctttgttattcatagtgagccactgggaccatgcctgagtttatactaacaaggtgactcatggtgggcccctagatagtttcaagatggggactagccattaggaaccaaccaaatgattagagggttggggttttgagccagattatatcagcctgacttccagggaggttagagattgagttcaatcacatggccaattatttgatcaatcatgcctcgtgatgaaacaccaataaaaactctggacctcaaggctcaattgagcctcctggtgggtgaacaccagtgtgctaggagggtgatacatcctgactccatggggagaagatatggaagctctgtgtttgggatcctcccagacctcaccctatggatctcttcatttggctggtcctgatttgtaccctttataataaaagtgtaatggtaagtatagcactttgctgagttatgtgagtcattgtagcaaattgtcaaatatgaggggttgtgggaacccccaaatttgtagccagttgatcagaaatgcaggtagcctggggaccccatattatgtggggtctctgaagtgagggcagtcttgttgaagactatgtccttaacctgtggagtctgtactaactccagctccaggtagttgacactgcaaaagtatatactgctgtattgcagagctggattcatgaatgcctgtttccagacttggatttaatttggttggtggtggggagccatagaaggtttatgagaagatgaatgacaggatcactaactgagattctggaagaataattgggcagagataaaggctatctagagctctccctgagtcacaggatcttttggtcatgcactctcaactttgacatgtgatgctggtcaccaaagatgcttcctttcaaaaataaacagcagctataaaggaactcacatatattggtagggttggagccatcccagggcaggccaggcctaggagctacaggaaatcctcacttctggaagcagaaggtcagttgcttcttcctggaccacaccctctgcagacactagggctcatggaggagtcctggagggatacacagcccaagcctttgctttccaccgtaagaggatggcagtagaatctgggtacagcttcctcttggaggtttggggaacccagtgacattcaggagcccccttttttaaaccttctgtgccctccagcttgcttctttccagcaacagctagccactggggcattgtatttcagcctttctggggcatcccctgcaagataggcaccggcactgcctgctctctctctccctggatctgatttagccttcactgaaaccctgcccaagatgatgacttaatctctgggctgagcgaatgcagccaatatgttcagatggattttgcaagacaaaagctcaaatctgttttgtggctgcagatacacattcagactgaaccacatccgtggtcattccagtcacaaacacaaagggtgccatgaattctttccatgaaaaataatttccattgtattgtttctgtcatcattcatttcatgataagtcagttaaaacagccggtccgagtctgtcattgattccaagagccccattgtcgtgtccttaacttactgatagttttaggtcttaattgttagtagcaaagtttcttttcaggaattctgttttctcattgactttgatgagaaagaaaatgtagagagatgctagcgaaaaaatttaattgccctcaaagaagtagcaatcttttttctttaatatatattatgcatcaagcaaaatcattttctgagaactagttccagattgcgtccaatgtcatgggttgtgtgtcttatttatttattttctcattgagatataattcacataccgtaaaatttaccattttaaagtgtacaattcagtggttttagtatattcaaaagactgtacaaccatcaccactacttccagaacattttcatgacagaaaaaagaaacttcgtcctcattagcagttactctccacttccactgtcttacattccctgacaacaactaatctctcttccatctctatgtacttgcctattctggacatttcatataagtggagtcatataatatgtggccttttggtctggcttctttcacttagcatgttttcaaggttcatccatgtcgtgcgatatatcagtacttcatttcacttcagaattgcataatactctattgtatgtgatgcagggcagatgaaccccaaattgggacttagtccatgaggatttttggctttgcccaggaaggaattcaagggcaagccagaggtagaagacagctttattgaagcagcagtggttacagctctgtgactgctcctgcagaacagggctaccccataggcaaagagtagcagctcagggtattttgcagtcatatttataccacttttaattacatatggattaaggggtggtttatgcagaaatttctagggaaggggtagtcacttttgggtcagcgggtcattgccatggaaaggagtggtaactcccaggtgttgtcatggcaatggtaaactgacatggctcactggtgggcatatcttatggaaagctggttctgccccttccttgttttagctagtccgcagtttggtgtctgacttcatctctggagtcgagtctcacttcctacctcatatggatatacaataatgtgtatatccattcatcaattgatggatattggattgtttccaatttttggctattatgaataatgctgctatgaacattcatgtgcaagtttttgtactgacatatttccaaatctcttgggtatatacctaggagtggaattgacgtgtcatatagtaaactctatgtttaacctactgaattagagtatctgggactacggcccagcaatctgttttaacagctctccaggtgattctatgatcaccacaatttgagaggcactgccctagagtaaggggcagtaaacagctagatagtaaatattggggtttgcaggccaagagtcaaaactgaggatgttaggtaagcacttacttgataagactgtaaacaaatttccaaacatttttattgacaaattgaaaaatataataataataattggtaacagggttgtttctgtttgttggtttttggttttttgagacatggtctcactctgtctcccaggcttgaatgcatagctcactgcagccttgacctcctgggctcaagtgatcctcccaagtaacttggagctacaggcatgcaccagcacactggctactttttacattttttgtaaagatgaggtctccctgtgtcgcccaggctggtctcaaactcctgggctcatgcgatcctcccacttcagcttcccaaagtgctgggattataggcatgagtcacttgagtcctgccaggaacagttttttgtaatgcagttttactaatgagaagaatgtgtttggtttttttgtttgtttgtttgttttttgctttgttttgttttttgcagggttgggagggcaacattttacttaattgggattcaaagttggtgttccctgtcatcaaatcaattgcagatattcatctgtaaaaaccattcttccggccagcgcagtggctcatgcctgtaatcccagcactttgggaggccgaggcgggcggatcacctgatgcagggagtctgagaccagcctgaccaacatggagaaaccccgtttctactaaaaatacaaaattagctgggcgtggtggtgcatgcctgtaatcccagctacttgggagctgaggcaggagaatcatttgaacgcgggaggtggaggttgcagtgagctgagattgcgccattgcactccagcctgggcaacaagagcaaaactctgtctcaaaactacaacaccaacaaaaaccattcttccttcatgggctgtaaagtaataagccgtgggccagatttggcctgtggctctatggtttcaactagttctggtgcatagcagcccccaaagttttagcagcgtggttagtggagagctgtggcttttgcctccatctaaatttttctttgagcaaattacctctctcctgacagccctgttgggggtgtcagttgtggggttctggtacctcccatcccggccccagctagagcaggcaggcccacaggaatttgaatctggagggagttatcagtggtggagcgtagaggctgcaggaatcttcatataagtggagtcatataatatgtggtcttttggtctggcttctttacttagcatgctttcaaggttcatccatgtcgtgggatatattagtgcttcatttcacttctgatggcagggtcctgaattaagtcctgccctgaggatcacactgttacatctaggccttgtaggattcctgagaattgcatcccatctgccctgctctaaaatctacacagcctttgccatatccatttatcgatttggctcagcaacatctactaatgatgcttaaatcctgggcaagtgtatttgaagtggccccagaggttaaagatctggatgttctccctccagcaacagcaccactgccccacagcctggggattttctgttctgcttgctattaatcacttacttattgcatacttatatgtgccaaaaatgggatcctctcttgccctattgtaaagtgatacccatcttctagaaaccaatccagcaatatatgagaagagccatagaaatgtgcccccttggggaaaagaaataatcctaagtagagaaaaatgtatttgagcaaagtcattcatggccacattctgcccttccgtggccagaaatggataaaagctgaatctactgccagcaagtatcacctccactcattcatgatgcagagcgtccccacccttcccactgggttgccttccagaaaacagcttccatgatgcccagtaatctctgtttcccttgatctctctcatctccttccttgtctaaccttcttctcttagaaaaggagcttcatcccctttggtcagtagccagcaaatctggattgctccctgtggcccttgtgctcaaggcaaatagaaccacctgctccacatcctcccatcttctgagtggaggggccttgagataatccacttctctgcttagagtggattcttgatgtatcactctaatgatttatgaggttaaaaggctccctcctcagtaggggtgagcttaaaatgttccctcctcagtaaggatgagcatagagagggaaaaggagctgacagaaccagagaatcccatccaccacatttacgatagtgaaaacattagaagccatccaatgttccaaacacctctggtaccagccaagggggctgacccaaggcaggatcccaggagctagggttgagtgggtgggggaggcactccaggcaacaaggcatcagatctgaggacaggtgccaggctcagcctgacaaggtaggccaagggacagttctagagaagcagccaggataacctgttttattttgtttttaattgggtgcagacacaaggggagtatggaaagccattggctcaggtctcaatgggtctcaaatttagacttctgctatttttttcttcaagtgcaattgcatatttagtctcagagagtgactctgacaagacccaaagagaacatttgtcatttggccttgaccttgtctccacatctggagagttggtatcacgtgtggtaccttatttgtacatttcttgggggttcataacaatgttataccacattactggtgaaaggaatattaatttgttcagtgtaaacactgaaatagctgacaatcttttatttttaattttaatctatttatttgttttgagactgggttaagagattggctaatatttgtattttgggtagaggtgggattttaccatgttgccaaggttggtcctgaactcttgggctcaagaaatccaccccccttggcctcccaaagtgctgggattacaggtgtgagccaccacacccagcctaaaatagctgacaatctttataaccctctttaggcatatttacattttatagtatattaggaacctcaaaaactgatggcaattcaggtttttccagtattcaagaaggcattatctaagctgtcagatctaggggggtggtgagtgtgatacataaattgggaggtaaatcaaaaagtctggagcaggcagaagaatgcaggaagaggtcagggagtgaaggactggattgagagggccaagatttggggtttgaacagggctgacttcagggagcgggagtctggccccaggtaaaacttagtgtcattgtgtgggtcagaagacaacaaaggatccttaaggaaactatggcccatcatctcagtagaccaggcagcctttgggaatgatggtcacaaagactctgtggcaacatagaaaatgctaatggtgtcatacagaatacagaactttatggacctatggtacaaacaaacacatgcatgtgcctgcacacacacacacacacacacacacacacatacacagaggaaacaagactggaaggggatacacctaaatataagtagtgcttgtgtccatggggtggagtgatattgtgggtttatttgctctgtatttttaaataaaacaatggctcaactcagaagataactgagtcagcgtctcatccagcagcccccggggcccctgggagaagccacctcccaccacctggccaagaagatctagacaggctgagaggctccctctccctctcctggggtcccgagccacaaatctaaagccacattccttgggtgaccaggcagggactgggggcagatgtcgaaactggcaaggccccactctgtggtacccagcctgctgtggctcctgtcctagtgccagctcctctgctgtcatcctgtccccaccccacacatccccacctccccagccagttgggcccaaggtgccctcactgatatgttggaggaataatctgcttctctccagctcctcaggagacccgcgtgggaggtcctgcgtcacgggctactgaggcacatgctgagtcccctcccatgggcctcagcacacctactatggcttagctcttcccacccaggacctcctcagggcttctcggcattccagaaagacaagaagattttcttggggccaaggcgttgctgggcctctctgtcccggccaggccctcggcaagctccatgcctcgactctactgccttctctctggtcctctctgtcacccttcagagacttttaaatcccatagtctgggcttcagggcctccaataaaagcagaataagacctataaggacttaatagagcttttatctataaaagagacagaccttctaatctaactagaaactaaggttaaaaaaaatgaaaagagttagacttaaactcttaaaaaaataaaaaaagattcagctctgtcagagtcagcctgatgtggtagacaaattgctcatgaattactcacagtgtttgctaaaaaatgctggttcctgggagtctctgagcctactctggctctagaggctgcccaatttaaaaaaaagaaaaatgcaggttcctgagtctagctccagaactaccaaatcaaaatctcggggaggtgaggactgggaatctgaatgtgtaacacgttccctacgtgattctgaagcacactgcaccggtggtttagtggtttccatgccaggagggcattgcgccctccttgagaaccctgccttcccagcactagctgctgggaggctggccagcacagacacagtcctccttcccaagagattcctagccctggcgaggaggaagactcggtgggtaacaggagttgcaatgtgggtttgtacccagttcttggggagcacagaggagaggggagttctcagagagggaagatgtctcagggaatgagtctctggggccagatcctgagggctcagtagcattgactagctaaagaagagagcagaggtatcccaaattgaggacatagcatgggcagaggcacaatggggagctgtaaacagtttagggcctgggcacaggtagggagtagaggggaggaggccagagagatgagtggggctggtcttcctgctggtttgtgttttgtccatttggctaatctgggaataatacttcccagaaaccccttctccagaggggtctagggtagagttggtcaaaagaggagcttgcatgagatttggaaaataaaagtgaagcagcatcctgactctcagggggttgtcacggtcatgtgccgtgatgacactgaggcagagatatgcctggccaatccacctctcgggctgctggctccctgtctggcccgtgttctggccagctgggcttgctgagctacagctgcctgcagacctgtccaccggctcccttcacggcctcactcaggcagctgatgtgcttgcttcttgggcttccctgcaaactctgacttgtcacccgtattaggccattcttgcattgctataaagaaatatctgagaccaggtgcggtggctcatgcctctgatcccagcagtttgggagcccaaggcaggaggatcacttaagcctaggaagaggaagttgcagtgagccaagattgcaccactacactccagcctgggcaacagaggaaaactctgtctcaaaattaaaaaatttaaaagaaggaaggaaggaaggctgactgacctgagtctgggtaatttataaagaaaagaggtttaattggcttgtggtcctgcaggcggtacaggaagcatggtgctgggcatctgctgggtttctggggaggcctcaggaagcttccaatcatgtcaaaaggtgaagggggaagccagcacctcacatggagagggggagcaagggagataatgggggagaggagggaagtgctacacgcctttttttttcttagacagggtcttactctgtcacccaggctggggtgcagtggtgcaaccacagctcactgcagcctcaaactcccaggctcaggtgatcctcccacctcagtctgcctagtagctgggactacaggtgcacaccaccattcctggctaatttttttttttttgtattttttgccatgttgaccaggctggtcttgaactcctgggctaaagtgatccacctgactcagcctcctaaagtattggaattacaagcatgagccaccatgcccagccaggagtccctttttgttctttttttaaattttattttagacagagtttcactcttgttgccccggctggagggtagtggagcgatctcggctcaccgcaacctctgcctcctgggttcaagcaattctcctgcctcagcctcccgagtagctgggattacaggcatgtgccaccatgcccggctaattttgtatttttattagagacagggtttctccatgttggtcaggctggtctcgaattcctgacctcaggtgatccacctgcctcggcctcccaaactgcttggattacaggcatgagccaccatgcctggcaggagtccctttttaagagcaggaaaaatattttccataagcaactcctccaacacacacacacacacacacacacacacacacacacacacacactcagagtccctccatggctcatcggggtagaccttttaatatccagggctggagaaggacaatcccttcacacttgaacgctgtgaagtctgtgcccttgtccagggcacctgccaggaggagtaggcagtgggtccggtctttcagtggagggcttctgcagcttcagatcgtctctaggagtctggaggtctatcttatggcttgtatttctggaaccgagtcatgcctgcttgaagataagaagatcaaacaacaggatgctgtggcttctcctatcccaggggcctcgaggacaaatcagttcccttcctgggggagcagatcctcctggctgggatcttcagtccaagttggttcaatttatatccttcacgtctggcttctcctgcatgtccaagtcacaggaattttaagtcaggatcttctctgcacccctgagcatgacagccagcctctgccctcatgaagctcccagtctaagggaagaaataataaattggtggccgggcatagtggctcatgcctataatcccagcactttgggaggccaaggtgggcagatcacttgaggtcgggagttcgagaccagcctggacaacatggtgaaaccccatctctactaacaatacaaaaattagccaggcgtggtggcatgtgcctgtagtcccagctactcaggaggctgaggcaggagaatcgctggaacctgggaggcagaggttgcagtgagccaagatcatgccactgccctccagcctgggtgacagagcaagactctgagattattatctcaaaataataataataataaaataataataataaattggcagttagagggcacttcgccaaggcaatatgagggaaactacaatctgtcaggaaaacacaggggaaggccctaactggcccaggaggttcagcggggcatccaggaggatgtatgagagccgaggagggagtagaaggtgatgtaggaaaaccacttagctgaaagactcgctgcccaaaggccggaggtgggagagagtgcgggacttgcaggaactaagaggagcccagagaggcatctgagaagagaagggcttggagagctgggagcatcagatcgggtttagcctgggggcctggctgaggtgagtgctctccatcctaaggccacaggaagcagaggagggacaggatcagattctgcgcccagaggaagactggcttagaggaggtgagtccagaggccaggagaatatcagaggccaggacaagggagacggcggccaaaccagggaagtggcactggagagaaatggatggattcaagagacgttaggcaaatggacagaaaacagaaaccgcgcacgtggtggttggtgagttgaatgcatgcaggagataggggcccaagggagaaccatagggggttgattccaagggtctggtggagcccctgaggggttggagacacccagctggtcagccacacagtctggtattaaatgacacacggctggtcagccacacagaagctgggccagtgtgaatgggtccggtaccgacttcagagtgtgcacctctgtctccccagacagcaacagaaggaccagggaaatttaaaagggagtctatgatgatattgtaatataaaatctctaatgaagatgtgactactagaaaaaagggaaataaagcgattgaggaaaggaaaacaacttgtgcataaagaagaaaagaataagcaactgaaagctcaaaacatttttccaggcctgggggatgaggtggagagagtctcttgctcccactccaggaggagggctgcctggaactaaagttggtgcttatgatctggtatttaaatgacattcttagtggtggtgttagcggtagcagagcaattgtgccagggcccaccgaccccttgctggttcactcagttgccaacatatactgatatactgagcacctgctgcaggccaggctctgtgatctcagatctcaagaacaagccagctcagtccctgtctaatagagcttacaactgggcagcggaggcagacctgccatgagacaaatataaaatgacaacttgtgacaagggttaggaaaaagaatagtggaatcctgttttagatgggatggtcagggaaggcctctgaggaggtgatatttgagccgacatcagatggatggcagagaatgcaagaagagtgtccctggcagagggaacagcatcgtcataattgggagctggtgctttcgaggaactaacagacaggcagggtgggtggagggtgggagccagggctgggctgggggttgtgaggacactgacaagagaccagttggagagggggcgggggctgaccatgcaggaattggaatctttcagtaaagtccagaccaaatgattcttcagggtccttgttcccccaggtttcaatgacactttaaaggtgttgtcgtaaaaggctggggagtctgtttctatgcccccaatctcatttaagaaggggggcatccaggccatcatggaacaggtgacctggaagatgttccttggtccagtttctgcaaactgccccgcagcatttttagaaaatgttcccttttagattcgatttatcttagccaaattgaccagggaaaataggtgcctacaaatagcgatcactggcaaacaaggagagttattatcttaaattaaggctggtttctaacaacaaaaaaaaacccaccaaatgccactggccaccccccaccaaccccgatccccagcgcatacgtgaggacgatggctccaccaccctccctgtaagtaccaggctcaatgccgggctctgtgcaaagggaaggaaacagacagaggaaggaaggcaagagattagagaagctgacagatgtaaatagcctcagaggagccacactgtcccggcatttctccccagggagccttttgtaccaaggaatctggttgcctgaaagaaaaatgttatcatttatttctttagtcagagctgagctgttttcttcagacatagaaataacctaacatcacacaccaaattgttggccaaatgacagagatacctgtaatgtgggtgtttaataatgtccagggtaaacaatcatggacttggtttcttgggaagggccccgttccccgccacggttgcaaagctacagagggtcttgaatgaaataagtgctttggaaaagttgtcccaaagttcttgcctgctgctgagctgggaggaagctgggcttttcatttctgctgctcaaatcatgccccagcagccaaacatccattaattcaacaaatatttatggagcccggattctggccaagccctgtgcaaaagcactgaggctacaaatgtgcaaaggctggggtcctgtcctcaatagcctcatagtccagaggggagacggccacgttcagcctgtgtgtcaatcttgtaacacagcctggatgtggcgtggtggtcagctctgtggaggaggcagtctcctcaaaaggagacttgaaggggaatttccaggccagaggagttggaggaggggatcctagacagactaaggagaatgtgcaaaagcagaggcttgaaaccccctgggcgatttagaaattaagagaaatacgatattgcagagaacaaagtgctaaggaagtcagcggtcaaatgcgtggctggacaggtagatggataccagatcatgtacttgtaagctaaggagtttagagttgaccttttaggtaataaattccatggaggaatttgagcggggaaatagcatgattagatttttgtattagaacactcactcctctctgtcctgaagaaactctagcatatgtcgcgtcaggagacaaattcgggcatcttccttagtgcattgggtttgatggtgaaaacactggaaacaaactaaatcagtagaaaaatagataagcaggccaggcgcagtggctcacgcctgtaatctcagcactttgggaggccgaggcaggtggatcacctgaggccaggagttcgagaccagcctggccaacatggtgaaacctcgtctctactacaaatacaaaaaattagctgggtgtggtggcacatacctgtagttccagctactcaggaagctgaggcaggagaattgcttgaactcaggaggcagaagttgcagtgagccaacattgcgccattgcactccagcctgggtgacagagcgagactctgtctcaaaaaaaaaaaaaaaagaaaaatagataagcaaatagtggtatagtcataaaatataataccattcaagattttaaaataatccaacatggctagatcttaaaagcataattttgagtaaaaaaaaaaggtgagtttcagcatatgtatggtatgataaaatgcgtgtgaaatttaaaaacgcacgtttgtatattgattataaataatatatgtaggacggtatgaaaacatggattgttgcctttggaaacaatccatggagggaaaggcatggaaagagaaatacatagaatttttctattggttttatatctaaaagaaatatgggcggggcatggtggcttacacctataatcccagcactttgggaggccaaggcaggaggatcacttgagctcaggagtttaagaccagcctgggaaacatagtgagaccttgtctctaataaaaataaaaaacattagctaggtgtagtggtgcacacctgtagtctcagcttcttgggaggctgaggtaggaagaccacttgagcccaggagatagaggctgcagtgagctatgattgtgccactgtactgcagtctgggcaacagagtgaaaccctgtgtaaaaaataaagaaatactgtagatggagctaaaatgctaacgtattaaatttcctgtgtttaaaatattttttgaactttgctttttaaaaaaacagagaaagtaaaatccatctggcagcggcatagcagatggaagggaggggattggggaatgggaccccgagccagtctctgtctccacacagcagctcctgggtggaggagagctggaggccgatcttgggggacccagggagtaatgcatgcagagaacacttcaccttgttgggctgcttttggcctctgggcagagcggaggcgtggtcctggcatcttgtctagtgtccctggaagatacggggctctgtcttgatcggaactggcgaccattctgacctgggatgtcagtatcatttttggacatctgccaaccaagggtcagaaacaggaggattttagaatacctgggaaagcttggcattgtatattcagagtaaagatggtgtgaatgtgtgtgtgtgagtgtgtgtgtgcatatgcaagcacatgtgcaaatccagaagcacagtgaaggtgagtgttccccaagggggtttgcagtggatgcagtgacgaatacattcactgatgaggatgctcttctatagttcagagaagtaagaatgaatcatgaatctttccagaaggaattcatttctagactccttcttacctttcagatctccatcgcctgacctagagtctcggctgaatagcataaacctgtatccatctacatatatttatacatctggcttagagccacagcagggaagaattcacagcaggatcttataggcacacagcctataggatcttatagattacagcctggatcttataggcatccattaaagaaaactacaggcatttccgcaactgcatatgaattgtgtcacatctgtatgtgctagaaggagttcaagggcatcaatattcctattgtaatacatctgcccagtgctagcagcattacttaagcaaacctatcaaaagcctaaagaataaagatgtggcggggtgcggtggctcacacctgtaatcccaacactttgggaggccgaggcgggggaatcacgaggtcaggagattgagaccatcctggctaacacagtgaaaccccgtctctactaaaaatacaaaaacaaattagccgggcgtggtggcacgtgcctgtagtcccggctactcaggaggctgaggcaggagaatcacttgaagccaggaggcagaggttgcagtgagccgtgagatcgcaccactgcactccagcctgggcgacagagtgagactctgtctcaaaaaaaaaaaaaaaaaaagaataaagatgtgcaccagcttgggcaacaaagtgaagccccatctctaaaaaaatacaaaaattagccgggcatggtggcaactgcctgtagcccagctactcaggagagtgagacaggaggatggcttgagcctgggaggcagaggctgcagtgagccatgattgctgccactgcactccagtctgggtgacaaagcaagactttgtctcaaaaaaaacatgtatagctacataattaataatatgcaaatattcttctttagggtcacttaggttttcaacatacagacccaagagaaggtacagagactcattctctctctctttcaatcacacacacacacacacacacacacacacacacacacacacacccctcttcactataattataattactatgttggcttccagatcaggggttagagccttggcatggagacgcctgaaaggcacccaaggcaattagtggtgtcccttctccaccccctacataccttcaggccctttgcacttgctgctccccctcccagtgcacacacccccagatccttgtgtggctccctctcccaccacattttggtcttagctcaaatgccacctcctcagaaatgcctggcctggccgccttcagggctgtctatatgctcaccagctttaattttctttcgagaactttccattcccggacattgtactaaatgtttatttgttatccgtccattatccatctccttgccagcactccctgtgagctccatgaggctccaagattacaaccacatgcccagagctagggtggtgcctggctcacagctggcatccagtcagtagcaatggaatgaatgaatgatcaccctctcttcctctccatccccaccctctcctttttcacttcctctcccgccccatctcccctgcctccgccttaaatctgctggcatgaccagccctcaggaagttgtcaggcaggggaggtgtgtgctctgcacccctctccttccatctctctttcccacctcccttatgggtacctatctctcctacctgcagctgctcgctgccagctctggccctcttggtgggcagaagcttaggcaccccagacaattgtagggaaattgggcattggagggcagccgtaagaaaggattcagtacctgccaaggaatgatgaatttagtctctcacccatgaacaggcatgcactttcagggctcaggttcggtctctaaagcagaacgtcattcagggcacccttcagtacccatgacccagtgtctcgcctttcctgcaggagtcggtgctgccactatggtgactcagcccctctcttctcctcattcattacctgggttcttcctgcagtgattgacagtatcctttttcttttgagatgaagtcttgctctgttgccagggctggagggcagtggcacaatcttggctcactgcaacctctgcctcctgggttcaagccattctcctgtctcagcctcccgagtacctgggattacaggtgcatgccaccatgccttgctaatttttgtatttttagtaaagatggggttttgccatgctggccaggccagtctctaactcgtgacctcaggtgatccacccgccttgacgtcccaaagtactgggattacaggtgtgagccaccacgcccagcaagttgcagctcttaatagcatgggcaccatataatttactgcccagattgggtcattttttagagtagaagtgggagctgttaataattacgcttggcctacaggtgtaaacgagaccaccctgggcaaaccaggcacatggtcgcattgactaagaggaatattcccctgcctcctgcatctccagccacaaaaggagcctcagctgttggtcaaagctgcccaatagctgagcccttgcctgcccttggacaagggagaagacagagggcaggttccaagaatggggtggggatgtggcaggaaggacggtgcaggccccagagctataatcaatgatctgggagccgggttgtggagcacagggctgtgtcaaggagcaggtgggaggtgggtgggtgtgggacatggcaccagcttttggtgtctgtgactctgaacttggcttactcgcaggtggcttctgcaggctctccaccctcccagctgcgtaagtcctgcctgattcaaggaaaacagggaattttggggtcctgtggctcctccaacgttcttttcctttacctccttgtgtaaatgtggcctgatttgtacttggagcataagtagacccctacagagcgtgtgtgtgtgtctgtgtgtgtgtgtgagagagagagagagagagtgagagagagagagacagagagagagaaagggacctatttccttctatccctctgtctgtcttactctcagactattaatacaagccctgagtctggctgtacccccagaacatgtgccccgccccctacaacaaaatgctgcccctcccagctaggtctgttgtttgttccttttctgattggcgccaggcttatagaccccatgtaggtagaatataactttccataaataacctctaacccgacctacaatttagccttcaggtttttttccccctcgtggtaatgggattgcagcctgggctgatccatcctgtatcttcaggtcccagaaagcagaccctaggtttggacattgcttggaattcctggtacccccatgttgccttgcacatggcaaggactcggtacatgttgaggaatggtggattctcttctacccatgagcagccatgcacttgcagtctttgcttgggctatgccttctgcctagaagcccccttctccacctggaaaatctctaagcagcacccactttgtgaagctttccctaaccactatccctcatcccctccacagagcaaattactcctatcttggattcccataacacttggtacaaaacagtgtgacctggttattgcccatgtgcccaccaggttctaagcagctcaagtgaggggtagggcaaggaactgagcccaagtatggctgtgggcaaaacatttaaccccttggtgcttcagtctcctcagattcaaacaccaacctggggctgggtgtggtggctcacgcctgtaatcccagcactttgggaggccgaggcaggcagatcacttgaggtcaagagttcgagactagcctggccaacatggtgaaaccccgtctctatcaaaaatacaaaaattagccaggcgtggtggcacgcacctgtaatcccagctactctggaggctgaggcaggagaatcacttgaatccgggaaggcagaagttgcagtaagccgagatcgtgacactgcactccagcctgggcaatagagcgagactctgtctcaaaacaaacaaacaaacaacacaaacctgacccagagcccgtgtccccacccactggaccgcactgcctctcagggatggaagatgtctctgtttcctacctgctctcatattctgggccctgagacactcatgatgcatggattttctgcaggggctcactgaggcctcctcgggggctggagccccaggaagggaccggccactgatacccactcacacctatcaaagacttgatgatgatgattaattcaagtgggttattggtagttaaactgacaagtcatcaggagggacctcagctttctttgtgggggtgggttcccccaaggtaggctggacttaatttaaagctttccagttgaccatcccaccttagggcaactgaagagtaactttagggttactcttcatctgaagatgctaactcagctagcatccagcactattaagacaccttggggaggcgagactttgagagaagtgcaggaggctggcccacttttgaagatcctacatttctacccaggaggcatcaaatccacacttcgaagaagatgaagtttcctgtgagctggtcctgaattgtacttggctttgtgttgtctatgccagtactaagcaggacttggccaggctggtcctccatgaatgactgtcaaatggaaaacagaattaggaaccaaagtagtggtgtagacaaaaggggctggaacctcagaggagagagggatcatgggagattggaacatctctggaaggttaggggaagagatgacaagtaatgtgaatcctaaagaaagaggattagttattgggggtgctaagtgtggatggcaaactaaggaagcagggatctgcatgaccatttggagtcagtaggaagcttggtggagtgggaggtgggagtcaagcagagaaggcctcccatgtcagatagggaaactgcacttgatcctgggcaagggggagctatggaaggcttttgagcaggggagtgatacaatgagaacagcattttggaagccagcatggaggggaggctgctaaaaggatacaaggctgaggttattaccatgccctgggtgaagaaatgcggtctgggtttggaaaggaagggataaacatgacttttcaaaggaagacataattgccacaagggccaccagagagcagtcaaaggtgtgtccaaggttggagctctagtgaccaagagaagggtgtcaactttgacagaaatgacgtcatgtgtggttgacaaaatgagaccacatcctttcggtcatgattcattgtctttattaacaatgtctctggactctggaagaacagactgttaattcataaagcaatattaacattgtcattctctacaagaaaaacttttgcataaataacttaagtgagaaaataaatatgtaacttaactctttaaaaaccactactttcattcttgtggacaagtcccacgtggaagaattgccaaaaaaacgaccagtcctgcaggctttcatatgtcatgtgcttctgtttaaaactttttttttttaacaattaaaaactacacagaaagtaagaggttgtctggaaatgattttcaaaaagatttttgggtggcagtattatgctctgcagtttctcagcatatgtacagcacttgtagtttttcccccaataatattcttttagtgtaagatatgccatcacatgtaagagcagtaagaagctgttttctaggcagaaatgtgtccgtgagtggtgggcagaaggcggtgtctcaaaagggatgtgctggtctgtgagtttgtgatggctgctccctcgggcctgcaaggccagtgtccttgaacctttcacttctcttcggaaggtgactttaaaacatggctatgggtcgggggagggatgctgctctttgggaagttggggcggatgtgatttctatccctcccaccaccctcggaccctctccttttctaccccaatggatgatgttatttctttgagatggaggggtggaggtagccaaacatccggggaagccaggctgggaagcagcatagcttcttccaggagtttgtcagccgtaaatatgtcagccataaatagactctttacttttttttttctgtttgtttttcatctttggctgtcagaagagagcatcacaactctgaattctggaagtgaccttggcactgaatcaatgcaactgcattcattctctctctttctctctctctctctcacctctgcccattcaaaaggcactggagtccttggaatcatatgccaatagtctcctcgagatcctattcccacctccaccctcattttacaaagtggaaattgaggtcccgaaggagaattgtgtagttcaaggttacacagcaagttagtggcagagccaggactagaaaccacatctacagttgcccccagtcttgtgctctgggcacgcctcaggctttctgatgggcagcgaggtgcaagggggaatcttatccaactttcttaaccagtccctggactttcccactcccacaccgctcccttaaaaccccagggcggtgaaaatgcttccatttctgcctcctctgaagtgggaccagcaaaggtaggcggccccagaggcggggctgcgtggctcagtgtctgtgactctcaattccctcccctgccccgtgggacccctcagctggcgggctgaggggggccttgccggcgcccgggattcctcagggcctggaaggtctcagccccctgccctgggttgcaggcatttacaatgaaatataaacaatcaaaccacgcgcagaggacagaaatgtggggcgcgggttcagggccggggcgcccgccggtggggaggggcgcgggcgggctctagtaggcgttctccagctcggcctggttggctttggcgctccgggcgcggggccgcggcttccggcccttctgcggccgagcggcctcggtcccgaagtccttgagctccgactggttgtggaagcgggtgaggcgcttgcacttgcacgaggccaccaggcgcaccttgcgcgcgcgcggcgcctcaccaccgggacacagcagctgcacgcgctgcgcgcggtagcggtcggggatgcagcggaagtcgggcccactaggtcgccaccacttgccgcggccgatggcgttgggcagcaggcgcgccgggccgcactggccggagcacaccagctcggtgaccggcttggcgctgcggcacggcccatcggtcacgtagcgggtgaagtgcagctcgcggcagctgtactcggacacgtctgtggagagaggcgcgcgtgagggtggccgcccgcctggccacccctgccctggaccggcccgtctctctccaccccagccctgcttttgccaagcctgtctccagaggcttttgcccctgaacatctattgcaggaaggtcccagatgctctagagctggtggaaagctctcctgcgcaccctgtcccctcggagccaaatgactgctggggttcaaacaccagggctccatcgctcactgcaggtgtcatcttgggcaagttccttaacctctctcttcttcctgtctgcaaaatgggccgccccaagcattgcgagttaatccattacacacgcaatgcagaaaataccatttggcacatatagctgaaagcgtcggctgttatgtattattattatcatttctcttctggggtcttcttatgatttaagccacacttgtgccgcagggtccctggcctgggcagggtaagtactcagcacaccttctgcctggctctggcttctcccaaattccttttccagccacttgggaggggtggacaggggatggagaaaggagtagaggttaattgaaggtaataaatcagggcagctgctgtggaggcgagggactgaaggggaggtgatcaggacaggaattcattagacttgaaaggaatcaaaggcagtgtgtccaaccccctcattatcaatgagaatactgaggcccagccagagaaaagaacttgcccaaaaggctgggctgcatctccggactccacttccctggggtcccagcaccttttggctccggcaagagtggaggctctgcgttcgagcatccatgggaggctgggctgggggatggagctgagggctgctttttactgtcgttactttcctaccataggggccctgagctctgacccaaaacctacaggttcagctgccacaaacattgacctggctctctgctgggcacatttcttgttctgtgttatctgaatgggcgcctcatggtgatactccctgggcaggcagagattgggctccgaggcctggcctgatcccctgcacacaccttgaccatgtctcctatggtggacttagatgggtgggagctttttaaatagctggtcgtcgtgtgagtaccagtccacccccaaaggtttcatggggatagttccaatgtgacaagaaagaatgaaaaatagtcttaagaccaaaccagagaggggacagagaaggccaccccccacccccactctgaagagcaagcacagcaggggagatgtggccactgccatcgtctggggctgctttctggtctgtgggctggtttgcatcctcacctctgcagggctggaatgtgtgtgtggtcaggggggcatttgcccagggaagggggcattttgcggcttttcgagaatagcgcccctaggccaggcacttcctctgcagatcatgactttgttttgagcatgtggcttcctcaggggctgtggcctctcgtgggagtccagcaaggtggacattttgtgtttgggttccttacagcccttcaggcagtcgctggagcccagctgaccttgcctagaaggggagctgtggggggaggcgcccttgtcctccattttgaagacggagggtcctggctggcctcccatgcagttgccctttttagcaccccatagtcccaacaggttgtgaggcggggagggctggggtccaggagcctgggcagtggacttctctgccacctggataatggccagaggacagggaagctcttagtctgaagtgtcatttcagacgcccccatggcctcaggattcctgccaattatagagccagatgcacactgtcacctgggcttctctgtgcaggcctgaccaggaacccagggttcctcttccttctccctcccctggaatgaggcaaggttgggactggggtggctgctgaggacagatgtccctactcctgcacagaggatgctgctctcccctccagggcctggactcagctgcacccatgtcaggggctaaaactgtgccgaaaactcccattccttcaagtgccagctccctgggcaggccgtgggcaatgcacactgcaggggtgcctctctggccttcctccccactgctttgtggagatctgtcccccacacccccccacacaccagggctatcttgcagttggatcaaaccaggttcacacctcagctcttctcactaccaagttactgagtgcctggaacctgtttcttccccttcgagctgggggttcacctcctggggattccatgatgtgggtctgtgtggtggggacagccaccaccagcatagagtgtccggtgccccacaggtgctgttctgtggatgggaggctcccttaccttgttcccttcccagtggtaccagcagctggacgtggctcctatattcccaggaggagattctttgaaaccttttcttttctgagcccctgagcctgttctgatgccctgatgccataccctcaccaccccagcgtcctccctgccctgggctctcaccagcgtctgttgcctcatgcctctgcacctgaatttgaaggctgcaccagcgagccattcttcccccacctccaggcaagactgttcctcgaccagtgctggcagaggccagcaatcttcactgggtctaccccagtcttccaagcctcccaaagagaagtttctaaaacctccccaggatcttttactaagaattctctcctccaccccatacctttggtctcaaaggggtggtggggaggccgccctccgttctccgcccggttcatggtcttgttgttctccagctccggtggaggctcggggtactctccgagctcggggatgatttccgtggcatcattcttgaacgcctgccacccctggccctccactacacggaaggctgtgtgtaccagcaggcagacgagacacagggccagtgggagctgcatggtaccagccagaggagggcacgccaccttccagtagcacaggctctggtctccagccgagacacggtcgcctttttaaagcccctctctgcttcatgccagccaatgaggacaggctggggcagggctggtcccatgtttccctcagccccggagggagggaaaggggtgtgctcagagcaaaccctccccaaagacttctcctctagctcagcaaacttccaaattgctgctggcactcccaggtgacccagagagagggggcgtgtgaggcaaggcccaagcctgctctccggcacctcccacgtgctggcggctgtggttttcagatatcaaaatgagctccggcttttaattgtctgtctccctgggccctcgggcattctcaaaacaaactgtggacccgctcaacaaagaaaatgtgcagttctgagtgcttcgcggggctgagcccggcctattccatttctcaggccaagttcatttgtcaccccaccaacaaatggcccaaggcgtttctgtttgacccccatagacccagccagaggcaaaaagatgcttttaaagaaatcccattggtcccaactccacaagtctcagcattcattgtcctaaccaagaaagcctctcttggtattctctggaaggcaagagagagaactagagggtcagagcaagggtgcccgcttgggagagagggcaggattctggttacaaatcgaggatgcgctggtcactcaggctcctgtggtggacagcacagaggaaatcccagctcatgctcctcagggatcctgtgcactgtgacaggcacttctgagccagggcactcactgtggctcgcagggtgatgtgctgaagacagtcatttccccaaccagtctgtgtgtgtgagaagacaacaccaaattcctttccttagcaaaagccacagccagcgtttttagtgctgacattttattttcttgtcttccagctggttacatttttcaaaaacagttttgagtcctgtatggaaagcttcattggtgcacaccacaggatgtgttccatgaagccatcccaggaccaagtggtcacaaagaagctaagagaaaatgctgccttggccctgcatataatgagccacacagggccggggcggggggcgggggggcaggtagaggcgtgggggagaaggattcacacctgaggtgcaagaagagaaaggaaggccagaggaatctttcattgaagacagattgtttgaggacaagcagctcctgtgaagaggctgcccagatcctctggtattttaactgggcaatgaatcagcatgccccacctgcagagcctctgcaagtcctttgccacctgcctcaacttgcaagtcgctgtgtccatctgcagccgactgtcctcctttccatcatccatcatccgacacatgaatgcagctgctctgacagttttacaagccagacagaagccccctcaggaagggccctctctgatacctgcttcctaagtcagtttccttcagggcagatgaaaacagctgtggccattgttgggggtgatctatctctcccagcagagccggtagtgttgtgagaagctggccctccgcgccacctccccttgtctatgaccctccagcctccttttcccttgctctggaatgtggactgttaaccctctcatgaccagacgactgccttcttgcaatggacttgggagagagcagttctgatgcctgggttccttgagcaggtaggatggatgcttatagccccacctgctgttgggagcggctggaccgtctgcattaaacagaggcagtgggattcatccctggaacgcgtctgccacctgctggagacaaaaggaggggtgactgcaggatggcaagtctcaggactggacgtgatttcctttcctttcctttccttatttggaagtgaagtaatattaaaaggaaaaagaagaatccagtggacttgaacctctaaatgatccacacccctctgaatggctcagcgagaacctgctgtgacatcttctgctgtttcatttaatgttaagtcattgacagctgtttatttttactcagtccacaaacttgtcattgttcacagtactccctggaattaaacccccagggttttagctgattcctattgtgagtagtttaggttatttccaattttttttcctatttccagcagggttgctatgaacatccttgtacggctgaaatttttttttttttctttttttggcagattctctctgtggcccaggctgcagtgcagtggcacaatcttggctcactgcaacctccacctcctgggttcaagcaattctcctgcctcagcctcccgagtagctgggattacaggaatgcaccaccacgcccggccaattttgtatttttagtagagacgggggtttctccatgttactcaggctggtctcgaacttctgacctcgggtgatctgcccaactcggcctcccaaggtgctggggattagaggcatgagccacaatgcccggcctcagagtaattttttaaattaaaattttaaaatgtggatataattataaatttaaatatacttataagaaataaaagcctgggcaacatggtgaggcctagtctctacaaaaaatttaaaaattagctgggcatggggtcgcacgcctgtggtcttagctacttgggaggctgaggtgggaggttcacttgaggttgaggtcgaggctgcagtgagccatacttgggccactgcactccagcctggatgacagagtgagaccccgtctcaaaaaataaaaataaaaaaaagaaaatgcagactccgtgtatcctttatccagtttcccacaacaataacaccttgcgaaactataggacaatatcacaactaggatattgatattgacacaatttaccaatcttacccacatctcccgtggtttaacctctactgtgtgcgtgcacacgcattcacgtgtgtgtatacttagttctatgcaatcttgtcacgggtaaatttggggatccaccacagtcaagataaagcacagctctgtgaccacaagtctttctcctgttgcccacctccttccctccttttccctccctcccacaactaacccctggcaactactcatctaatctccatttctgtcatttttttttttcacttcaaaattgttacataaatgcggccaggtgcggtggctcactcatgtaatcccagcactttgggaagccaaggcaggcagatcacttgaggtcaggagttcgagaccagcctggccaacatggcgaaaccctgtctctactaaaaatacaaaaattagctgggcatggtggcacgcacctgtaatcccagctacttgggaagctaaggcaagagaatcgcttgaactcaggaggcggaagttgcagtgagctgagatcgcgccactgtgctccagcctgggtgacagagtgagactgtctcaaaaaaaaaaaaaaaggttatataaatggaatcaattagtatgtagcctttggggatttttttttcactcagcattatttccattatccaagttgtacatatcagtaacatgttcctttttcttttcttttttttttttttggctgagtagtattccacaaagtttaaaaaaacaaaacaaaactttagagttatttctggaagtgaatgctgtgtctgagggagtgtgaagagtttggtggtctgatgagggtattgcagggctgttttccagaaaaagcccagtccccgccctcacctgcaaaatagaggctcccataggtggtactttgatgaggctgccgtaactaagtaccacaaattgggtggcataaacaacagaagtcgtctcacagagctggaggttaggagtgcaagttcaagacattggcagagttggttccttcgaggacagcgaggaaggccttttacctgccttctgctggctgctgacaagctgtggcattcactggcttgcagaagtgtcacccccaatccctgccttcatcttcacatggtgttctctctgtgttcgaattttcccttttttctaaggaggtcaggcatattagattaggcccagcctaatgacctcatcttaacgagttacatctgtaatagccctatttccaaataaggtcacattctcaggtactgtgacttaggacttcaatatatgcatttgggaggaatgcagttcaacccataaataagactgtcaacactgggtttgggatgttgatttttttttttttttttttttttttttttgagacagagtctcgctctgtcacccaggcgggagtgcagtggtgtgatcttggctcatataacctccacctcctgggttcaagcagttctcctgcctcagcctcccgagtagctaggactacagactcccgccaccacacccagctaatttttgcattttttttatttgttttgtagagatggggtttcgccatgtcggccaggctggtcttgaactcctgacatcaggtgttcccacaatcccataaagtgctgggattgcaggcgggagccaccgcacccagccgatttttttaaacattgaatttaacagttgaaacttaatttccagaaaagctgcttttccatgtgattatttaccagcttttgtttctgtcgagttgcttcttccgatgttcactcgccaaacgtttaataaagcaagggggacacgcactccctctccaggagctcgcataccatggaagaaataatttccgcatccaaacaactccactaccagatggaaggtgatcaatgccactgaaaaaaaggttcagatgcttttttctaaaaaaaactttattttttttctggagcacttttaggttcacagcaaaactgagtggatggtacagagatttctcatttatgtcctgtgcccacacatgtacagctgcccccgttatcaacatcccgccaccagagtggtgcatttgctatgattgatgagcctacatgacacatcattatcacctgaagtccatggtttacatcacagcactagtgttgtacatcctatggctttggacaaatgtataatgacatacatctaccattatagtatcatacagatgggcagtattttcattgtccaaaaaaactatctgctctgcctattcatccctccccgactttccccaacccctggcaaccactgatctttttactgtacctttatttttgccttttccaggatgtcatatagagttggaatatacccatacatagtcttttcagattggcttctttcagttagtaatattcatttggggttcctccatgtcttttcatggcatgaacagcttattttttttttttagcactgagtaatactccatcgtcttgatgtatcacggtttatctagtcacctactgtcatctactgaaggacatcttggttgctttcaagctctggcaattattaatagaggtggtataaacattttgtacaggttttttgttttgttttgtcttaagacggagtcttactctgtctcccaggctggggtgcagtgccgtgatctcagctcactgcaacctccgcctcctgggttcaagtgattctcctggctcagcctcccgagtaggtgggattacaggtgagcaccaccacacctggctaatttttgtatttttagtagagaaggggtttccccatgttggccagtatggtctcaaactcctaacctcaagtgatctgcccacctcagcctcccaaagtgctgggattacaggcatgagccaccatgcccagctgtgtgcaggtttttatacgaacgttaagttttcaaatcatttgaataaataccaaggagcatgactgctggattgtgcaataaaagtatgtgtagttttgcaagaaactaaactgcaaactgtcctccaaagtggctgtaccattttgcattccccactgaaacaaagagttcctgttgttccacatcctcaccagatgcattttttcaaaaggacaattttcttatgggccttcaaaggagagaacaatctctttcccctggggaggatctgggatccttatggtaagatgtggcatttggaccagactttgaatgacaggccaaatttggaaagtatattatgctcctttgactccttgggatcatagaatctttgatctggaaggactctcaaaggtcatccggtttcattctctacttggttctggaggaggcccctatctctaattaatggaaactgaggattctccttattggctgcattttaaaacagattttgctcccacttgtaggtggtaaaaaggaaatatctggattaggagggcaaacttctgcttttaggcagtaccctgcattgagggatgtccaaatcaccttgtctttatttacacatccatacacaatggaatgctatgtagctgttaagatgaagggggtagaacaataaaaacaataaccataatataagctaagcaaaacaaacaacaaagcagagatatctctgtatatacacacgtatgcacatatgtgtgcttatatatgcttgacattttcctttaaggatatgatgcttatggggagacagattgaaggagcaagtgactcacttttccgtataagccttttgcattgtttaagtgtattactatgtacatatagtattatttttaatgaaaaattttttaaaaattatacttaaaaacttttacctgttttatattttagtgctctgccttaagattttgtgtagaaccataaagattacattgtcagagtcttgacaaacaggaagcgagtccaattgcttcatgtgatagagggaatgggaacctcgagaggctttctctgcccagacttctgtctgggaggaaaaggcaactactttctctaaggttttttattcaaaggaacatagcaccaatagtggaatttaaggcatctgggggaaggggatatgtttagggactgttcatttgcaggatcactcaaatctcaaaatgtcacccagtcatcacgtgaggctaccttgagatgaacaccctagtcccctgctttcttagaagcacaaaccttacctccttcattcaggaccattatggccattctacctaagaatattcctaccagaacatttctggtactggaaaggtgttcatcaatatctactgcataaacagtgccatcatggaacctataactagctcagaacggctatgttttagatgattatttttaaaaagttagaaatcgcaaatataaaagctaagcccaaacaaaaaaagctaagcataaaaacgtaaaagaataccaactgtgataagaaggacaaaaaaacaatacctttgtaatgtaagacatttattttggctaaagttctggtgttttaacactgatttgtgatacaacggacattaaacttccttttaaaaagaaaaaaacaatttggtagctctcccttttctgtccagaaaaattcactctttcataatcaaattaccctaaaatttggtggcgttaagaggcaacaaaagttaagcttccaacgaatctgttctctcaaccggaaatgtcttctatttccaatcaggataaaaccttgacttacttgcaaggactatcacggttagcccttcagtgattcctgacaccagttctgtgaaaaagaaaatttcctgcgagaaaagctcatgtcttcatattgaagatcagtacttttttttttttttttcctttaaaacagtagcatcttaacttgtggcacaaaaggcaccaacattccctttccaaaccatccatcaccatgggtggaaggcagcgccacctgctgcccatcatattatggctcacatacccataatttccttgcggtgctgaattccaagtggggattattagagacccctcagagccaaaaggggaccttagaggtcttctagatgagtcccctcatttgtaggtggtggtttctggataactcagagtggcagggacacagacgagcctgtggaaaggtatactgctttaagattgagaagaaaaccatttggcgctctaattttgcctggatggtgctctgtcagtcaaagaaagggaacaggtctggggagggggtaagggcaccctgagttcctgttccatcacttcccaggcagtagaaggctgtccaggaacagctcccatccgcagctgggcatgtgttggctcttacacaagagactttaattttacttgaagaactaagagctaaatcttgttaagtaaatacggggtttcaggggtgaaggactatcaagaaatcccaagttatcagcataaaagtagtcccaaagtaaaggcagtaattctcccaatggccttttctccctcatgcccccacagagactttcgagaggtcctagttagccagccacaccaacctgctgtgttcgcgtaagtagctgtgcctgtcccatggggtgaccactgcctggtcatgggaggggagccccagccccagctccctagccttttccaggagcagagcagaaagctctacttcggggtgctacatcccacctggagaaagagctgcacattctagcctatgagggacccacccttttcacttgcttctccggggctggattgagggtaagtgcagtacacctggagatcccagggagcccccttcttgagaaagagtatcgtatgaaagaatccagcttcagggagcagcaaacccaaaatcttgcccagctccaccttatggagctggacaaccctgggggccaggcccttaatcattctgaacctcagttccttttttttaaaaaaggtcacaatacaagaacaagctctactaactttacagggttactgtgaggctcaagttagattaagttggaaggctacctagaagctgtgcagtgaggtacccagtttagaggatggccatttcacttaggtgggtttatctggacacctttttcactatctggagaagaagacacatactggttgttcagggctgctgtggtcacagagaaaagcggacagcaaatgaccaggctgggcagggctgcttctgtgtgatcagagaccttcccagccgggagtgaggccttacgccacacctgcctctccgtgtcccagccaggagctcctggccaactctgaaaaaggcacattccctaccttggcatattaacactgcctgaatttaaatgtaaaactgagttgtaaatagtcaacaaaagtccctgatatttctttcgttttaggtaagactccttcacaaggccttgcgagtgatcctaccatgaattcagtcttctgggagcgtgacacacccaccagaacaatgccctatatatatttggtgctcaaaaagtgtttactttcttaaacttttatcagacacctatgtgcaaggtgctgggggcatggctgaggaccttctctttgcccagagtgaccctgaagataaatagcatcacaatcactttccataataacaataacgtaaaatcctaacaagactgtatttaaaacaaaactcttatattctggcaaatgtgcatacacatgtgagggctggtgcattccaatatcatccttagaaagtcttttgaaaggtttatcgtgtttgggtttttttgctctaccaccaataaaggatccatttggacactccgccatgtctcatgtctgcctggctgagtcacttcagggatcccgtgctggcaccagagagctgtaagagccacctgcaatgggcagggtgtgtgcctgggacctttcacttccctgcttgtcttctggccgcgtttctgagaggcacgccccccacacacatccatgcacacacgctgtaattggccaacttcctccttctgttcttggaatagcaaccgagacaaaaagcagttagcacgagtggcttgggcttgccaacactacaattcaggacaaaacccttgtaattctccaaatggtggggtttttaaataggttggacttcaactccctgttttctaaaaaagaaaaaaaaaaaagcatgcccaaggcatcactcttctcaaaaacgaagtgactgagataagatcgaagggaaatattccagagcagcagattctgaactcaaggcttccaaagattcacattttgaaaactctatggatttaggagggttctccaggtttgcccacaaggcctctttgtgtagggaccattcatcctaaggaaatcattcaaatgcagccttgctgtgggaatctccatccactaataactgacggacacccccaccccagcttcggacctcaagacgtgagagggctgcctatgcacagggtgtggaaggctgtggggacagtgcagggcacagacgtggtggggagagtggcctgcatttgcatagttcctttactagggctcaaggtgttgaggtccacactcaagagaggattcgggagttggggaagggaggtcatgagggacctctgtgagcatcttaggccttacacttccacacacctcctgccgtgggccatcgggaagcatgcaggccacaggccttccccctctgagcccccatctcagggaaaagacatcataagttacagaaacaggacaactggggagcaaggacgccccccttggcaagcttctttatgtgctccccagggtggggaaagtggcccaggactgtgttgggacacacttgtagacaagtgccttgtgatgctgggagcagggtacagtgtgtttcctaaacatggcagctcgggacacctttgcccacggcctcccccacggacctctcgagcagaggtggtgggggtgccctagggtttcaacttcccctccttggctagtctgtcattgagctggcagagctgggccaggaagccatcgttggggccgatctcacggttctgcctcacgatgctcagggcagacttgacgtccatcttctgccgcatcatgaggtaggcgataactagcgttggggagcggctataaccttcccggcagtggacgagcacccggcctgtaagaaacaggggagacgtggtgagctgggggcgtcccatcacaccatggcgttggtcaagactcttccgtgaagtgccacttaaaagcacaatgtcacgccactgtgtgcctgtcagaatggctaaaatgaaaaggatggaaaacccaaagtgctggtgaagatatggggcaactggaactcttctgcgtggctgggggaggtgaggcgtgaattggcacaaccactttggaaagctgtgcggcacggcggtatctcctcaagctgaacacgtgcatcccctctggcccagcaatcccactcccaggcccaggtccaatagagatacgcattcacattcacgaacatgggccagaatgttcacaggcaacactgcacatcatggcccacagttagaaacccccaaaggcccatccacagtagaaaggacaaatacaaagaatgaccagactgccacttagcagaagcaacacggaggcagcacacacatatgaggtggatgagcccacagagtaggaaagcgggcaaaaccatctgtgctgtcagaagcctgcaaggggctgggcacagtggctcacgcctgtaatcccagcactttgggaggccaaggcaactggatcacaaggtcaggagttcgagaccagactggccaacatagtgaaatcccgtctttactaaagatacaaaaaaatagctgggtgtggtggcgcgagcctataatcccagctactcaggaggctgaggccagagaattgcttgaacccaggaggcagaggttgcggtgaggtgagattgtgctgagattgtgctccagcctgggtgacagagcgagactctgtctcaaaaaaaaaaagaagcccgcgtggcagaggccctgggagctggggatgggggtggtggagcatagagactgggggtgctttccagggtgctggtagtgttttgtttctttttttttgagatggagtttccttcttgttgcccaggctggagtgcagtggcgcgatctcggctcacttcagcctccgcctcccgggttcaagcaattctcctgcctcagcctcctgagtagctgggactacaggcgcatgccaccatgcccagctaatttttttgtatcttttagtagaggtggggttattttaatatagtgtgtgtgtgcgtgtatatatatgtgtgtgtgtgtgtgtgtgtgtgtgtgtgtatgtgtgtgtatatatatatatataaatagacaccatctctcaatatccacagggcagattggctccaggacctcctgccgatacccaaatccacagatgctcaagtccctgattataaaatgacatcatatatgcaaataacctctgcacagcacatcctcccctatactttaaatcatctccagatgacttatgatacccaagacaatgtaaacatttattagattatatcatctagagaataatgacaagaaaaaaaatctgtacatgttcagtacagacataacatctttttatgttgtttttaatatttttcagactgaggttagttgaatccacagatgtggaacccacggatatggaggaccgactgtatattctattggttctgttttttctagagaatcctgaccaatacactggttattaactcatgatccacctaacctcaaggtgcctcagttttcttatctggccaatagtacccattgcacaaggtggttagattaaaggagaggacacatgaatcctctaggttagcacctggcatccatgtgcactcaataaatgttacccaatactgggcatcctctggtagcacctagtacaccctcaactacagcagccctggtcctgtgtcattgccagacatgcgcagattgacttttctctcccagaggacgaattctttaagagcaagaaatggccggacacggtggctcacacctataatcccaacactttgggaggtcgaggtgggcggatcccctgaagtcaggagttcgagaccatcctggccaacatggcgaaaccccgtttctactaaaaatacaaaaaattagctgggcatggtggcacatgcctgtaatcccagctactcagaaagctgaggcaggagaatcacttgaacctgggaggtggagggtgcagtgagctgagattgagccactgtactccagcctgggtgacaagagcgagactccgtctcaaaaaaaaaaaaaaaaaaaggcaagaaatgtggggcattgatttttggatgcgttacaatctctagcatacactatgtgctcaataaatatttgctgactagctgagtgaattattacctactaacacctctataaggccattgtttggcaaggaatctgctagcccagagtccaacagagtctcttctgctcctatcaccctacccccaaaacaccactctattttcccaatgccttccaaatcaggaagcaggagtcctccactttcttgcccattcaccctccggcctgtatgcccgaaatattcagagtggggcttcccctgccccaccctaggaatgagaccctctgcagagcagccaccttaccatctagaacatactctgcatgcccagtgcacacagagcctactgggaaaggggccagttcaacctcccattcctctaggctcagcccagatgccacctcctccatgaagctgttttcccagctagaagtgactgctccctcttgagtaccctcagccatcccacccagctctcagtgatgggtccctgggccccacacactgttggaggccagcatgtttctgttgactcacttcgccactcattcttagaagcatttatacttggcattagagcccatggaattcttcatcacttgctcattcatcatttgcagtgtacctactatgtgcctgatgctacatcaggtgctaaggagacagacaaggaacaaagtagacccagcctgagggcaggcttcatggaagagaggacaccatgccaaggacaaggtggagtttgccagaggaaggggtagggagaggcagagagaacttttcagactaaagacccagcacacctggactgagacaggtcaaaaaaagggcgtgttcctagttgtttggaaagaggaaacaaagtcagagagcttgaaattccctgaatgaataaccaattgctattatacgagaacaacaaaatccttccccttcgcccagcctatgtttacacagggtgaggaactcagtacagctggagtggaggaggtgagcagggttggggggtgacagtgaccaggaaggaccatgaggggcctgtcagcaaagtctgcagatactccacagtaaagcttctctctgagccctgagcgttcactgtccagtggtctagaaaattctgtttactggaaatcattcagacagtgagcctgctgggcccaagagtcatcagtgtagtacagccaaggctgttcacacctcatgggggtcccctccgctgggagggtttggggtggggagagacgaagaggtaaagggaggagctgagagaaacagctaaaagcagaaagggagaaagggcaagtggcccagcctgctcagctgatgtctgctttgtggccttctagggtttcttgctggaatgccttggtgactgccagcgccttggtagttctccttcagtcttatcttatatttgggggctgcaggaagtgtttcgtaagtggctggaagatttggccaggggggctgtggtttgctgactgccaacctaagctgaccgcagctaccccttttctccttgccaggcaatcacgtgaatctctagccaatgagatgtgaggggtatttctgggaaatgttttacttgttcttaaagagagagactgggcatggtggcacgtgcttgtagtcccagctactcaggaggctgaggtgagaggactgcttgagcccaggagttggagaccagtctagacaacatagcaagaccctgtctctttaaaaaagagagagagagtggccaggcgcggtggctcatgcctgtaatcccagcactttgggaggcagagggaggcggatcacctgaggtcaggagttggagaccagcctgaccaacatggtgaaaccccatctctactaaaaatacaaaattagccaggcgtgggggcgcatgcctgtaatcccagctacttgggaggctgaggcgggaggctgaggcaggagaatcgcttgaacctgggaggtggaggttgcggtgagccaagatcgcgccattgctcttcagcctgggcaacaagagtgaaactccatctaaaaaaaaaaaaaaaaaaaaaaaaggagagagagaagaggaaaaaaaagagtgggaagagatggctgcagggcctcatctgctgtactttgtcctgcttggatgtggtgactggatcccatcttgggaccatgacgggagcacccaacactgaggtggcagaagagagaaagggaaagggcctggtccagaggccaccatggagctgctgaatcaagcagccccttaatcaaccagcccccatgctccttcacctcaggacttcttgccatgcacattaacacattaacacatcttcctcatcgttacagctgtttgaatgggggacgtgtaagcaactggaaaccaacctccagccaaagtgcagtcaaacgcgaggaccctggggctgccatggtgtgaatgagttgcacatcctgtgacacacggggccacttgacagccagccaggtgagcagagagagacctacagctctgtcgttcaccccagaagatgggaaacaagggagtttctaagaagagacctgttgtgggcctgttttccagagggacagtccagtcagagctgcctcccatcttttcctggtgggaggtcccttaccattcttttgagccaaagcctggtcaatgaagtcggcagccctttcaaagtaagcgctgaggttgaactcctgtgtgtcgttggccttgatgcccaggtatgtgatgccggagtccttgtagaagttggcattggtgttgacgtgcatgaaggacctgccctcagccgcgttcagcacatgggtgatgcctagtttctgcagcttggggatgtcctgagccacagacctggacaggagacagtggtggggatgattaaccaaccaaatggcagccccagggggaggaagatggagaaggatttaagcctcttagcaaagcaaggaaaccctccatgctctggcccctgccagcttctcctgcctcatcttatgacctcttccctcactctggccatatcgaattgccagcagcttccccaaatagactggtggtttcatagccatgctgtcccctctgtctggaatgctctttcccaccttctctggagaaatgcgccctctcatctttcacaccctccgcagtgtttgtctcccctccattccatttggccccatgctccctaagctgtggtgggggtgtacatagccaactggttacagatgggctctggaaccagactaactgggtctgcatcctgcccaggtactagccaggcaaccttaagcaagccatttaacctttctgtgcctcagtttccctctctgtaaaatggggataacagtgccttctccttgaggttgttatgagtattaaatgggctattccattgacagagctggacacggtagtgagcactatgattctaatgcttgattgtgcttctgtgtttagacatccagactgtgagctccttgagagaggaaccatgtctgctttaagtctgtttccccaccatctgctatagtacctgctacatagtaggtgctgaataaataagcggtgaatgagtgcaaaagaataaatttgtcacgtaccaggcagccccctccctgcccccagagggatcctacctgccacattccactggctacgtttccaaagctcttttgggtgatttagtacttggggagtaagtggccccaacagaactatgggaggttacaaaataatttatctaaggtcgggtgcagtggctcacacctgtaatcccagcactctgggaagccgaggcaggtggatcacctgtcaggagttcgggaccagcctggccaacatggtgaaaccccgtctctactaaaaatacaaaagtgagccgggtgtggtggtacatgcctgtaatcccagctactctgggattacagaggctgagacaggagaatcacttgaacccgggaggtggaggttgcagtgtgctgagattgtgctattgcactctagcctgggtgacagagtgagactccgtctcgaaaaataaaataaaataaaataaaaataataattggtctgaatggtgaaaaggcccctttatttcatctcacaaaacatcccagtccaaatagcagtttatactttataaaatgccacctcctgtgtgatcttgcttgcccactgcgagcagccctgtgaggaacaaggatggcaatatccctgcttaacagagcttgaactcaggcccaacaggatgagcagagggatgggcacaggccccgtgtgctgctggtggcagatctgggagaagacctcctttctcccgacatccagccctgctctatcttccacctcactctgcccctcatgcccacatctgctgcaaaacccccaaggcctggcacatgtggctcacacaggctctggctctgccttgtgaggacgtggctgcggccctgattttgttaagggaatggagcccaaatcctcttggtgcttggtgctcactgatcctccctgttgaggaacccccacacccctggccaagtcaaggtcagaggtgcttagagggcaagggatgtattttctacagtggccatcagcaattgccactctggctacaccagacgtgtacaaccttggtttccacttgggaagtgatgacagctgaatggccaacctgcccaagcaagcgggattcctgaggctaacaaggcctgcttgctgcttggtgcaagaggaagggtgtctctagagctttccaattcctgaagcctttggctgacactgtgggactctgtttattcctgcttaggacaccgcgcaagactgtgaagcagtggctgatagaaaaaaacactttgaagagtcactcccattcatctcccttctctaatactttttttttttgagatggagtttcgctcttgttgcccagttggagtgcaacggtacgatcttggctcactgtaacctccacctcccgtgttcaaacgattctcctgcctcagcctccggagtagctgggatcacaggcgccaggcaccatgcccagctaatttttgtatttttagtagagacagggtttcaccatgttggtcaggctggtctcgaactgctgacctcaggtgacccacccgcctcggcctcccaaagtgctgggattacaggcgtgagccatcgtgccaggcctctaatactattaataattcaacattcaaaaaatttacaattatcattattactatctctactatgaatgaacattgtacagtgcctgacataaagcaggtgctcagactggtgaatgaatgatggaatggatgagaactgtccccatgaggctggggcctgatggaccccttctagttccatgatgacccccatttccgtggcagtccttggcaggctaaacagcaggtcatagcggaggtcaggaaatacatacatgaacaagacattgaccctgtccttgtagtccctcacacactctgagccaccatttcctcctctgtaaaatgggaggagggttagttttgagttttcaacatgccatccttgggctgagccatgaagcttaggattttggtaactgggtcctcagagtatcgtgaaaatccaacttgaggctttccaaggctgtacaggcatgctaatatattctttcttgaggctcctatttcacatctcagaatgttaacactggttctttcctgctgattagacattcttactagaaaaaaaatttaaaatttaaattaaaaaaaatctcttactgtccgggtgcggtggctcacgcctgtaatcccagcacttttggaggccgaggtgggcggatcatgaggtcaggagtttgagaccagcctggccaagagaccagcctggccaatatggtgaaaccccgtctctactaaaaatacaaaaagtagccaggcgtggtggcgggcgcctgtaatcccagctactcgggaggctgaggcaggagaattgcttgaacccaggaggcagaggttgcagtgagccgagatctcgccattgcactccagcctgggtgacagagcctgggggtgaaaggtcaagagccttttctaggtggtggctcaggtccttaggggggttatcactggaccgttctagaatctcctgtaaatcaaatcacatctggaaggtgggggcctggaaatcccggcccagctccccggactcgctcatttggggtgtttaggttccctgatccgggactgccgggccgggaaaattccatgcccgaattgtgacgtcggcccgttgccatggcggcgaaggcagacattccgcggtgacctcactgcagaaccaggcagctgtcacatgacgcgcgggcaggagaccggccgggcgaccgagggtcacctgttaagtgaacatggtagccccgaccccgcccaaggccaagccccaagcgggtggcggctgggacccgggcaggcgccacccgggctccgtgcaccccgccacggggaagggccgcgcccggccaggcagggttccagttccttggccccacgcgcgggggtaggcgtcgactccaggcccctcccaagcccccgctgtggctcccggaggggccatcgcgcccgggctcccccaacccaagactcgcgacaccccgaccccagcctcgggtgggcggggcgtcccgagagggacggcggggccgggctcgcgaaagggactcacgcgttgcccacgtagatccgcggggtgacctcgttgcagggctggctcgggaggctgtagcagccgctgccgtccgagagcaggtcgttgagatcctgcaccgagagctcgaacgagcccgacatggcggcggcggggccctgcacgcccggcaggagcaagcgaggcggagagcggcggatcagctgggcgggggctcgcgccgggagccgccccgtcccgcccctggggcgggcccgccgggctccgggagctgcggagcgcgggcgccgtgacgcgggggccccgcgcgccactcctgggcgcgtcccggggggaagacgccaccgccctggagtctcaggggtcctcgccccatcccggtccaggccgtttgtgtatctttgtaaactggcaagcgcggtaacttccttccctgaattaaatgcagggcccaataaacatttcgtggcggaggtacacctaggggtcgcttcagtctttcatgattacagggaccgccgggttcggctcgtgagcggctccctgcagtggaggcaccacccgggcgcttgacagaatccccgccccagcccagccctgctggatcagagtggacattttacggaccccaggaggtccctacggtcaaagtctgagaagccctactctggggcgcatctgctttcaacattcattgagagtcatcgtcgtgcttaaaagcagtcaggtttggaattctgaggaattacttaacctgagcctgtttgcagggaaaaaaaaaaaaagcgggatagtaatggtacctaattctagggttgctggaagggttaaatgtgacattcaaagaaggcacccagcactgcatggcgagcactcaataggtgttagtccttcatcaacaaatgcgttgagcacccagtgggtgctataccctgtgctggggtggagataaatcagactcctgcagcccttcctggagcagatgccagcccaccataagccactcagcatttcctgaactcccactaagtacaaaagatagtctctgtactggaggaaagctgccctcccctactgccatgaaaaactggcagtttccttcctgcaaaagggcaaatttggccttgaattcaggaaccccacatcctgagcccagccctgccaccaacttggttcttgagtaacgttgctgctgctgtggtcttcagtttcctcatttgcaaaaggaattggatccgattatcattagggtcaactttctcctcctccaaaacttgtggtcttgcaccttcaggggagctattgcagtggagactacttagctgatagcccaagatgtgtaaccaaggctggaatttctgtatccctcaccccaccccgtgcctgcccacccctcccggtgcaccacttctttccttctggtgttggctggcagcatctgcattctaagcagcggggaaagctttcgagttccttgaccttcatcttgacttgagccgaggttagcattaaaaacacaagcccagaggcagccagccatgctctgctgctcctactcccttcccgggacctgtccctgatgtcataactgggtaactatgacagcttgtcatggggacagctaggcacctcacagaggagtctgggtacctcatttctgaagtgagactaggaagagaagatgaacaattccctggattatctggcctaccctgttatcgtctctaatcacaggcaaagcacaaccttcagaaagaaactggactttggccactacgtatctcacaagaatagaatacaaataggtatgtgggcagtttgggctggacactgctattagggattttggaatggtaccccataaagagatcaacaggaaaccagaccaggtcacagctttgggatgatatggccttatctgctgagtttggggaagagggcattagcaccaataacaaaatgtatcttccaccagggagttcactggatggaaatactcctttaaactccttaaagccgaagtacgttagaaaggggataagacttcagaagccaatagacaggctaataatattggaaaaagattggaagagaagctctttcattggattagaaggacatttatctctgtaaattttattttcactattcttttgtttctgctcaaaactctccagagatgttcatttgataaatcaaaccaaacttcttgagtcgcattaaggtcctaattcgaaattgttcattagtcaaggacattgtctagtgctggttttctgaggccgctactggaattcctgtgatgtaacattgttcccttttatcccccttctctagcgaagcctactgttgataccaaacctccagtggcgcacacaaatcacattttaaaattgagcaaactacaggtatttgttcttgctgcttgcagatgtgcagatgtattttattgacttccagtctgtttcctaaagaggttcaatttcccagagccttctaaatacccatctactcaaagatttgttaatactcctcctccccacgcgtcacccccagtcgtttttttcccccctgatacggagtctcgctctgttgcctaggctggagtgcacaatctcggctcactgcaacctccgcctcccagattcaagcaattctcccgcctcagcctccagagtagctgggattacaggcatgtggcaccatgcccagctaatttttcatatttttagtagagacaggggttcaccatgttggccaggatggtcttagtctcattacctcccgcctgcctcggcctcccaaagtgctgggattacaggcgtgagccaccgtgcccggccgcccagtcttttaagttctgcttccagtctccactgtggccctcaatgcacccctttcccacgatctcagaggaggggaacactaagtcattgtgtgttggggcagtgcactgatggtgtcaccatggtgaggtgtggtttcttaccagggtgaacaaaagaaaatcaacaaaatcgagtatgaaaacaagcaactgtgtcagaaaatcgcaaatgcccatcgcggccctgccaaggtggattgctggaatgaatatttttccaagaggtaatgttctttgtcttcatttcagttttgaaaagtcaaaattgactttcctcttgggttttagtgtgaggttttcccaagtcagagaagtacttaagggaagttatcttgagggagaaccaaacagaccatgttacacagaatgaaaactttaaaaatggggacctttctctagcattaaagagcttttatttcatcgaagagacttttcagagtcctattcagtgtgtcacaagaatgcactgcgcacttttataaaatggtggccatgtgtcttagtccattatagggcgctatagcaaattgctataaactggtggcttataaacaacaaaaatttctcatagttctagaggcaaggaagtccaaagatcaaggtgccagtaaattcggcatctgaggagggcctgcttcatagacaaccatcttttcactgtaacctcacggggcagaaggagaaagaggcttctttcataaggacactaattccattagggtgacctaatcagctctcaaaggcccaccccctaataccatcaccttcatggttaggatttgaacataagaattttgggggacacaggcatctgttccatagcaccatggctggggctatgatgtgacattcttaaaatcagttccagaaatctttcctgagcaactactatgtgctaggtaccaggaataataaagatgaaatgagatgtatatttccttacctcaaagaactcaaggtcttgtaggggagatatttatggaaataatgacaatgcagtgtgattagggatacaaaagaagctcatgcaagagaaagaatttgctgggggcgaggagatggtcaagatgccattctatatcctggtatattctggtataagttgaaagctgagaggagtgaggtgacccaaaacttgtcgccagccgtttgtgatttattcacagggagaccttcccccaaccagaagttctcaatcctggttttacattataatccttggggaattttaagaaaatgccagtgtgcacggttcacctcagatcaatgaagtagaatcttctcatgggcaacagggttgaggaccactgatataaacctgcgaatgcggtgcatgtttcccggagtgcagtgcagaccaacaggctgtcccaggggcctgtgggctcagcaggacagtttactccctgcacttagacagtctggcatttatgatctcatgacttcatctcccccactcgtcaagatgagcatttccttcttcacccatttcggggttttgtgtttttcagcttaaacagagaaacaaggaaccgcgagctagtgagaatcaccatggaaaaccagggcattctgaagaggcttgttgatcgcaaaccccactatgaccgcagggcatctgagatagactggcaggcacgtgggcactcatgttatactcccagacacacacagagtttgtcggtgttcagcctagagagagtctcagaaaaatccctgaacagctagagtcagatcacatgaaatgtaacaatcgttaaaagaaaaaccatccaaagcaaacaaagctaacaggcacaaaccatcaaacaaacagctaaaacagcttggtagcaaagccattatgtgtcagtttcataacataacaattatgtgtcagtttcagaaaaataatctagtagcgtcttccctcaccccttaattcattaagaaaggctgaatgtacagggatgaagggtataagattcagtcagtatgcggttggtttgcttcatttaggaatgacccttaaaaaggccaggggaggggaaaccatctgtggtgttttaaaaaacctccacttaccgactttggtctttaaatcttttctaagtcatccctgggatttagaacttcagtaatagcaccaatgccctggcattgacataaaccaatttttttccttcaagaattcaaggcgctatatcagaaataccacgagatatcttctctcccaaaatgaataggtatgtctctcttactatcaaacactgtgaccacagctgataccaaagccctgagaaccccataaatggcgaatgaggggcccagttaaggagacggattttgctcttctcatataatattgactagtcttccattcgggaaacttggggctctctgactttatttcttctctccatacaagaaggaaatgacattgtcttttgtcatcatctttgaggctttgtgggagtctgaggggaagtgatttgttccaataagacataaactggaagacctgtggctttaaaattgtgccaaagttacattccaggtctctgtcagtattcaaaagtaccagcatgttgtcattttgtattatttaacattattagtgatgactaagtggtttcccccacccaagggagaaagataaatggacacttaggcgttccaaagaatagttctgtataattgatgtgtctccttctctcttctccactgaatacaaggttactcaccatggaaaagatacaagagaaggccctaggatttcttggctgctcaggatctcaagacactcccgactggctgaatgctccatcttcagatgcttcaataaagcttggaacataaaatgcgtaagttacatttaggggacccaaaggctttatgttctcattccaaaatggggcaggcagaaggaaagatgcaatgagcatttttatttggggctatgaaaagaagttttaacgagagagagagagagaaatctgagagaactctttaaaacatacaccatcatcaccatcccgtggaagaagaaaagctggggtgagatcatccagccacaagtacagcactgtcaaaatggaaaacgaaatcacatgacaacatcaaggttcagaaaacacaaggaacaaatgccattagttcctctgtgaatacacacgatcggaaaagaatgcctcattgaagtttccatggactctgttcatttatagggagcagcagcagtgaaaatgtctcaaaacatacggtgagacaatgttgcaggcctgctatgattggtcatgctagttttcagcccaactatattagtcagcatttgccaaagagacagactcaataggagagagagagagagagagagagtgagagagatagatagagagtgagagagagagagaaagagagagagagaggagaggatttatttggggaattggctcacaagatcatggaagctaaagaagtcccaccacaggccatctgcaagctggagaccctggtggagcagggcagacaacccccaaagtggggcttagcctgcgagtgttcttggcttcacccaggaaagaatttaagggtgagccagtggtagggtagaagaagacagttttattgaagcagcagtgttacagctccatgactgctcctgcagtacagggctaccccaaaggcagagagttttgcagtcatagttatacgtacttttaattacatgtagattaaggggcggtttgtgcagaaattctagggaaggagtagtaatttttttttttttttttgagatgaaatctcactctgtcgcccaggctggagtgcagatggcgcgatctcagctcactgcaacctccgcctcctgggttcaagcgattctcctgcctcagcctcccaagtagctgagactacaggcactcgccaccacgcccagctaatttttgtatttttagtagagacgaggtttcaccatcttggccaggctggtcttgaactcctgacctcgtgatccgcccgcctcggcctctcaaagtgctgggattacaggcgtgagccaccatgtccggcctataggaaagggtagtaatttttgggtccttgggtcattgccctggaaaggggtggtaactcctaggtgttgctacggtaatggtaaactgacatggcacactagtgggagtgtcttatggaaagctgcttccacccctttcctgttttagctagtcctcaattggatcctgtgtccaagccccgcctctggagtcaaggcctgcctcccacctcactgggatgctggtagcatggcttggtccaagcccaaaaacctcagaaccaagaagaaggtggtgtaactctcagttcgaggccaaaggctgagaacccactaggggggacaagggtgctggtgtgagtcttggagtacaaaggccaaggagcctagagttgttgtcccaggacaggagaggaagagtgtattccagttccagcagatagattgacatattcgcctcttgtctgtttttgttctttctgaatccacagcaagttggatgatgcctctccacattgagagtggatcttcccacatagttcactcagacttacatgctaatctcccctggaaacactcacagacacacccaaaaataatgctttaccaggtttctattcagtcaagttggcaccttaaattaaccatcgcactgactttttaaactttctattttgaaataatgaaaattcacaggtagttgcacataaaggaacagggaggcctcctgcaccctttacccagtctccaccaatgttagcatcttgcgtaactggagtacaatatcaaaaccaggaaactgacattggcatgatgcatggaacctatgcaggtttcatcagttatacatgcactcatttttgtacatatatgtatagctctatgcggtttttgccacatgtatagctttgtgtaaccacattcgagatacttaaaaccactattatcaaaagacactcttattgccacccttttagccacagtcacctcagaccctcaagcctaactcttggcaatcacaatctgttttccacctctctgttagttcatggtattacgtaaatggcgtcatgcaatgtatgttcatccttttgagattggcttttttcactcaggataatttccttgatgttcatccaagttgtgtgtgcctttttattgctgagtagtattccatggtatggacatgctacaatatatttaaccatacatccatcaaaggacattggggtagtttctagtttttcaaacattattattattattattattattattttgagatggagtctcattctgttgcccaggctggagtgcagtggcacgatcttggctcactgcaacctccacctctggggttcaagcgattctcctgcctcagcctcctgagtagctgggattacaagcatgcatcaccaggcccggctaatttttatatttttagtagagacagggtttcaccatgttgacccggctggtctcaaattcctgacctcaggtgatccacctgcctcggcctcccaaagtgctgggattacagacatgagccaccacacctggcctgattttttaaatagcaaattttgaaagttatttacatattataggaataagtcctttgcctgctatgcgccttgcatgtatttttctcccagtctataatttgtcttttcatcctcagggtctttgacagagtaaaatatttttatttggatgacatccaatatatcaatgatgaaactgttctatatcttgactctatcaatgtcaatatccttgttgtgatactgtaccatatagttttgcactatgctaccactgggggaatctggtaaggagtttacaggatctctctgtattatttcctacatgcatgtgaatatacaattatctcaaaataaaaagcttaaaaaaaacaacatgcctaaatacaaattcattattaactggttccagttaatctcagtttgaggaacaaccattcttctagacacccaggttaaaaacctgaggtcatcttttacttcattccttctctttcctcctatccccctccctacatatctttttttggttttttgtttgtttgtttgtttaaagacagagtcactctcttgcccaggctatggtctatggaggtgatcttaaagctacaagtcttatgtctcaatctctgtatgagctactgccatatttcaggcacttgtgatttgcaacttgcattactaatgcaaaaatacgcccatatcactttctagcttaatggcttccgtgatttgccattcttgcataatgggctggagctttatatagagcatacaaggcttttcatgatccagcccatgaactgctcaggttatattagttatagtttcaaatgtttggagattttccagttatctttctgttattaatttttaatttgatcccattatgtccagagaatatactctatcatttcaattcttttaaatttgttaaggtttttttaaatcaaggtgaatattttatggacatttgaaaagaatgtgtattgcactgttattgggcaaagtgttctataaatatgttaggtcccgttggttgatggtgttcagttcttctacatcctgatgattttctctctagtagttctatcagttgctaagggtggggtgttgaaatccccaactctaattgtggatttgtctatttctctttttaactctgtttttgcttcatatattttgaagctctggtgtttggcacatacacattaaagattgctatatatttttggtggattgatttattgattttttttttttttttgagacagggtctcactctgtcacccaggctggagtgcagcacactgctgagtgtgatctcagttcactgcaacttccatctcctaggctcaagcaatcctcccacctcagtctcccaagtggctgggactataggcacgcaccactgtgcccagctgatttttgtattttttttagtagagatggggtttcatcatattgcccaggctggtctcgaattcctgggctcaagcgatccgcccacgttggcctcccaaagtactgagattacagaagtgagatctctttattattatataatgtccctctttgtccctagtaattttctttctctgaacttactttatctgatattaacatactcagtactgctttcttaaaattagtgtttgcatgatgtattaccttttatcctttcactttcagcctacctgtctcattatgtttgaaggaacatatacttgcagacagcagatacagacagtctctgacttacaatggtttgacttaaatgattttttttttttttttgagacggagtctcgctctgtcgcccaggctggagtgcagtggcgcaatctcggctcactgcaagctccgcctcccgggttcacgccattctcctgcctcagcctcccgagtagctgggactataggcgcccgccaccatgcccagctaattttttgtagttttagtagagacggggtttcactatgttagccaggatggtctctatctcctgacctcgtgatctgcccacctcggcctcccaaagtgctgggattagaggcgtgagtcaccgcgcccggcatgatttttttttttttaaccttatgatggttcaaaagcaatatacattcagtagaaatcatactttaagtacccatacaaccatttctattgttcactttcagtaccgtattcaacagataacatgacatattcaatactttatcataaaataggctttatgttaggtaattttgcccaactataggctaatgtaagtgttctgagcacatttaagttaggcctggctaagctataatgtttgacaggttagatgtattaaatgtatttttgactttgaatgtttttcaacttaccatggatttattgggaacataacctcatcataagtcaagaagcatctgtacgtctgtttttatgtattgtgttgtttctttctttccctccctccttgttcccttcccttctctcctcctcctcttccccctcccattccctcctctcccctcccctccccttcccttcccttccttctaccttctttccctttcttaggtcccagcctccttctgttaatttatttctgtatggagagcttcctttagccattctttaagggtaggtctcaacaaactgtttctcttcatctgagaatgtcttcatttttccctttattcctgaaggccaatttcacctgataacaggattcaaggttgacggttttgttttcagcacttgataagtgttggaccacttctagatggcccccatcatttcttttacaggtagtgcaaaaatacagtttgaattagcattccttcctggttgtttctccctgactgttttaaagatttcttttttcttaatctccagtttttagaaggttaattatgatgtgtcagtatggctttggactgttttctctatttggagctcaatcaacttcttgaatctgtaggtgtttgtcttccaccggatttgggaagttttcagccattatttctccgaatacgttttagtctcacactttctcctctcctgcaaagactctgatgatacaaatgtcagtagctctatcacaggatccttagggtgtcacttcaccagccagaaacctctgtggctagtggcatcttctgcctgagtattgcttgtgcccgctgggcttgttctgcccactcagcccagcaggctgcgctcagctcacactacaggcccagatcccacacttgccaggggtgagccaggcatggagtggcaaggcgtgtgtgggcaagtgagcgcagggtctggccactatgcacagccaggcatgctggctgctgtggtggggtggggagctcaggtgctggcacaggtgccagctccatgcaaggctgtggctggaccagatgtactgcacacggcttccactgcaggcatccacgcctggatgaggggaacgcagtggcacccggaagcttggagacgccagaaatcgcagagcccgaaagagggtgtcacagccctagctcagggagctgcagctcttctctccttgtcacccacaacatggagagtgggggtggcggcaggggggtgtttcagccctatttgtgttacggctcttttagccctgccatttgaagaggaggaaaaaatgattctataccgtcttgttctgaaaccataagcctgatgtttaaaggaagtagtggttggtggctgtattcaaagggcaggaaaaatggagtaagaaactgatcagtggctgggcactgtggcccatacctgtaatcccagcactttgggaggccaaggcaggtggattgcttgaggtcaggagttcaagaccagcctgaccaacatggtgaaaccccgtctgtactaaaaataaaaaaaattagccaggcatggtggtgggtgcctgtagtcctagctactcaggaggctgaggcaggagaatcgcttgaacctgggaggcagaggttgcagtcagacgaaatcatgccattgcactctagcctgggcgacagacactccgtctcaaaaaaatagaaagaaagaaagaaagaaatcgatcaatattaactccaccaaatagagaaatgctgctcattggttcttaactatctgattaaaaatgggctttgtgcatatgctgaactctgcagttattaaagaaatcatgaagtgttattgtttggatgcatagtcctgtgattggtagcataaatgatgtgatactgggtaagtggatacaaaatttgattggccacatgttttaaagcatgtatttgaacatacaattggctaatatatctgagcactgcctgtaaatgacagatggttctaactttcttgaacccatcttccacagggagtgaagtggatagcagggaaggttacaaatcagtggattgagaatggcaaacaggaataactcactactgattctgcccagctgctactgaacactgtcctgaaagagccaaagacattactaattgatcacagcactctcctgttgagtttagttgatcacaataagagtgctgtgatcacaataagagagtgctgtgatcaattagtaatgtcttccaccggttcaggaatgggcgttggctgcacatatgccacctatttaacacttccgacctagaaaattcctctagagagcacatcctctctggctgtagatacaggcagccaacttatctgtttgaagacccaaggattaaaaaaggtccatcttgaggggtttgtaataaggagatttattagtgttgggcccagagtaatggatggagtttttccaacattttgcccaggggctcagaacatatggactgctagttgagatggggcttggaattacatttacacacattccaccaataaatatttgaacacaggtgcattttttaacaatagttttctgcatgaactgcaaaaatgccttccaaatgacctctgtctctggggtcctacccttcctactcccataaatctggtagccaacaaacagctgtagacacagcttgtcttggggattaggggctgccttgacaggaaataaagcaaggatcactttttttttttttttgagacagggtctcactttgttgctcaggctggagtgcagtggtgcaatcagagatcactgcagcctccatctacctgggctcaagcaattctcccacctcagcttcccgagtagctgggaccacaggggcacaccaccatgaccagctaatttttttttttatactttaagttctagggtacatgtgcacaacgtggaggtttgttacaaaggtatacatgtgtcatgttggtgtgctgcacccgttaactcgtcatttacattaggtatatctcctaatgctatccctcctccctccccccaccccacgacaggccctggtgtgtgatgttccccaccctgtgtccaagtgttctcattgttcaattcccacctatgagtgagaacatgcagtgtttggttttctgtccttgcgatagtttgctcagaatgatggtttccagcttcatccatttccctacaaaggatatgaactcatccttttttacggctgcatagtattccatggtgtaaatgtgtcacattttcttaatccagtctatcattgatggacatttgggttgttccaagtctttgctactgtgaatagtgccgcaataaacatatgtgtgcatgtgtctttataccagcatgatttataatcctttgggtacatgcccagtgatgggatggctgggtaaaatggtatttctagttctagatccttgaggaatcgccacactgtcttccacaatggtggaactagtttacagtcccaccaacagtgtaaaagtgttcctatttctccacatcctctccagcacctgttgttttctgactttttaatgatcgccattctaactggtgtgagatggtatctcatagtggttttgatgtgcatttctctgatggccagtgatggtgagcattttttcatgtgtctgttggctgcataaatgtcttcttctgagaagtgtctgtttatatcctttgcccactttttgatggggctgtttgatttttgcttgtaaatttaagttctttgtagattttggatattagcccattgtcagatgagtagattgcaaaaattttctcccattctgtaggttgcctgttcactctgacggtagtttcttttgctgtgcagaagctctttagtttaattagatcccatttgtcaattttggcttttgttgccattgcttttggtgttttagtcatgaagtcctcgcccgtgcctatggcctgaatggtattgcctaggttttcttctggggtttttatcgttttaagtctaacatttaagtctttaatccatcttcaattaatttttgtgtaagatataaggaagggatccagtttcagctttctacatatggctagccagttttcccagcaccatttattaaatagggaatcatttccccatttcttgtttttgtcaggtttctcaaagatcagatggttttaggtgtgtgatattatttccgggggctctattctgttccattggtctatatctctgttttggtaccagtaccattttgttttggttactgtaggcttgtagtatagtttgaagtcaggtagcatgatgcctccagttttgttcttttggcttaggattgtcttggcaatgcgggctcttttttggttccatatgaactttaaagtagttttttccaattctgtgaagaaagtcattggtagcttgatggggatggcattgaatctataaattaccttgggcagtatggccattttcacaatattgattcttcctatccatgagcatggaatgttcttccatttgtttgtgtcctcttttatttcgttgagcagtggtttgtagttctccttgaagaggtccttcacatcccttgtaagttggattcctaggtattttattctctttgaagcaattgtgaatgggagttcactcatgatttggctctttgtttgtctgttattggtgtataggaatgcttgcgatttttgcacattgattttgtatcctgagactttgctgaagttgcttatcagcttaaggagattttgggctgagatgatggggttttctacatatacaatcatgttatctgcaaacagggacaatttgacttcgtcttttcctaattgaataccctctatttctttctcttgcctgactgccctggccagaacttccaacactacgttgaataggaatagtgagagagagcatccctgtcttgtgccagttttcaaagggaatgcttccagtttttgcccattcagtatgatactggctgtgggtttatcatatatagctcttattattttgagatacgtcccatcaatacctagtttattgagagtttttagcatgaagggctgttgaattttgtcgaaggccttttctgcatctattgagataatcatgtggtttttgtctttggttctgtttatatgatggattacgtttattgatttgcataggttgaaccagccttgcatcccagagatgaagccaacttgatcatgataggtaagctttttgatgtgctgctggatttggtttgccggtattttattgaggatttttgcatcaatgttcatcagggatattggtctaaaattctctttttttgtcgtgtctctgtcaggctttgatatcaggatgttggcctcataaaatgaattagggaggattctctctttttctattgattggaatagtttcagaaggaacggtaccagctcctctttgtacctctggtagaattcggctgtgaatctgtctggtcctggactttttttggttggtaggctattaattattgcctcaatttcagaacttgttattggtctattcagggattcaacttcttcctgttttagtcttgggagggtgtatgtgtccaggaatttatccatttcttctaggtcttctagtttatttgcatagaggtgtttatagtattctctgatggtagtttgtatttctgtgggatcagtggtgatatcccctttatcattttttattgcgtctatttgattcttctctcttttcttcattagtcttgctagcggtctatcaattttgttgatcttttcaaaaaaccagctcctggattcattgattttttgaagggttttttgtgtctctatctccttcaattctgctctgatcttagttatctcttgccttctgctagcttttgaatgtgtttgctcttgcttctctagttcttttaattgtgatgttagggtgtcaattttagatctttcctgctttctcttgtgggcatttagtgctataaatttccctctacacactgctttaaatgtgtcccagagattctggtatgttgtgtctttgttctcattggtttcaaagaacatctttatttctgccttcatttcgttatgtacccagtagtcattcaggatcaggttgttcagtttccatgtagttgagcagttttgagagagtttcttaatcctgagttctagtttgattgcactgtggtctgagagacagtttgttataatttctgttcttttacatttgctgaggagtgctttacttccaactatgtggtcaattttggaataggtgtgatgtgctgctgagaagaatgtatattctgttgatttagggtgcagagttctgtagatgtctattaggtccgcttggtgcagagctgagttcaattcctggatatccttgttaacttttttgtctcattgatctgtctaatgttgacagtggggggttaaagtctcccattattattgtgtgggagtctaagtctctttgtaggtctctaaggacttgctttatgaatctgggtgctcctgtactgggagcatatatatttaggatagttagctcttcttgttgatcactttaccattacgtaatggccttttttgtctcttttgatctttgttggtttaaagtctattttatcagagactagaattgcaacccccgctttttttttgttttccatttgcttggtagatcttcctccatccctttattttgagcctatgtgtgtctctgcacgtgagatgggtctcctgaatacagcacactgatgggttttgactctatccaatttgccagtctgtgtcttttaattggagcatttagcccatttacttttaaggttaatattgttatgtgtgaatttgatcctgtcatcatgatgttagctggttattttgctcgttagttgatgcagtttcttcctagcattgatggtctttacaatttggcatgtttttgcagtggctggtaccagttgttcctttccaggtttagtgcttccttcaggagctcttgtaaggcaggcctggtgatgacaaaatctcttagcatttgtttgtctgtaaaggattttatttctccttcacttatgaagtttagtttggctggatatgaaattctgggttgaaaattctttcctttaagaatgttgaatattggctcccactctcttctggcttgtagagtttctgccaagagatccgctgttagtctgatgggcttccctttgtgggtaacccaacctttctctctggctgcccttaacattttctccttcatttcaactttggtgaatctgataattatgtgtcttggggttgctcttctcgaggagtatctttgtggcattctctgtatttcctgaatttgaatgttggcctgccttgctcgattggggaagttctcccgcataatatcctgaagagtgttttccaacttggttccattctccccatcactttcgggtacaccaatcagacgtaggtttggtcttttcacatagtcccatatttcttggaggctttgttcatttctttttactcttttttctctaaacttcttttctcgcttcatttccttcatttgatcttcaatcactgataccctttctcccacttgatcaaatcagctactgaagcttgtgcatgcgtcatgtagttctcatgccatggttttcagctccatcaggtcatttaaggacttctctacactgtttattctagttacccattcgtctaatcttttttcaaggtttttagctgctttgcgatgggtttgaacatcctcctttagctcggagaagtctgttattaccgatcatctgaagccttcttctctcaactcatcgaagtcattctctgtccagctttgttccattgctggcgaggagctgcattcctttggaggagaagaggcgctctgatttttagaattttcagcttttctgctctggtttctccccatctttgtggttttatctacctttggtctttgatgatggtgacgtacaggtggggttttggtgtggatgtcctttctgtttcttagttttccttctaacagtcaggaccctcagctgcaggtctgttggagtttgctggaggtccactccagaccctgtttgcctgggtatcaccagcggaggctgcagaacagcaaatattgcagaacagcaaatgatgccatctgatccttcttctggaagctttgtctcagaggggcacccagctgtatgaggtgtcagtcggcccctactgggaggtgtctcccagttaggctactcgggggtcagggacccacttgaggaggcagtctgtccgttctcagatctcaaactccatgctgggagaagcactactctcttcaaagctgtcagacagggacgtttaagtctgcagaagtttctgctgccttttgttcagctatgccctgcccctggaggtggagtctacagaggcaggcaggcctccttgagctgcagtgggctccacccagttccagcttccaggctgctttgtttacctactcaagcctcagcaattgtggacgcccctcccccagcctcgctgctgccttgcagttctatctcagactgctgtgctagcagtgagcgaggctcaatgggcatgggaccctctgagccaggcacgggatataaactcctggtgtgccgtttgctaaggctgttggaaaagtgcagtattagggtgggagtgtcccgattttccaggtaccgtctgtcacggcttccctttgctaggaaagggaattccctgacctcttgcacttccagggtgaggtgacgccctgccctgctccatgggctgcagccactgtctgacaagccccagtgagatgaacctggtagctcagctggaaatgcagaaatcacccatcttctgcatcgctcatgctggcagctgcagactggagctattcctatttggccatcttggaacctacccccccaactaatttttaaatttttattttattgtttttatttatttaagacacagtcttgctctgttgcccaggctggagtgcagtggcatgatcttggttcactgcaacctctgcctcccaggttcaagcaattcttgtgcctcagcctctcgagtagctgggattataggcgtgtgccaccatgcctggctaatttttgtatttttagtagagacagggtttcaccatattggccagactggtctcaaactcctggcctcaagtgatctgcctacttcagcctcccaaagtgctgggattacaagcgtgagccaatgctgctggctctaattttatgtttaatagagacaaggtcttgctatgttgcccaggctggtcttgaactcctgagcccaagtgatcctcctgcctcggcctcccaaagtgctgggattacaggcgtgagtcaccacacttggctaaggatcactttttaatactctgcttcataatacatgtaaagagaattaccatcatttaatctgacaattgtgtaaaaatattatgtaagcagcagaaaatgcctgtggagtggtataaaatgcagaaagaacatcattgggtgcccaaccactgtgttcccacactggagggaaaaccacctacatggggctttgagacttgattaggatgtccaccatgatgcctcctgaggggatcttcaaaagtaatttttaacgtatgtgggtttgttttgcttttgcctgtgagcagacttcagatcccagctctcctgcataacaactttttttttgagacagagtctcatttgtcacccaggctggagtgcagtggcacggtctcggctcactgcaacctctgcctcccaggtttaagtgattctcctgcctcagcctcccaagtagctgggattacaggcacccgccaccatgcccagctaattttttttttttttttttttttttttttagtagagacggggtttcaccattttggccaggctggtctcaaactcctgacctcaagtgatccactgcctcagcctcccaaagtgctaggattacaggcattatcctgcataacaactttgcatgtgctggtcacacttcaggggcagctgccctccctggcctggctctctgtagatcagctcaagaccaatttcacttgataagaatccaatactctctaagtgtaaagaagtccccatctttttactagaaagttctgaagaatgtgatcctgttacgtggacctaccagttcatgagctagagcgttgcaaaggtatccttgtgtagaaggtaaaatggaaatttctaaatgggtggcaaaccttctccctggtgcttcaccttcaacttggcctccttttcctttcatgagtaaaagaagttgaaaatgtacacgtgtatgtagcctcttttcagtcttagaagttatggtcacacttcatattataaattctagctgtaaacacattcatcatttataagtgaattatattagtgagtagcctcgattatgggaccacaaaagaatgaggcagtatagtatagtggttaacgatcatctctggtatttgggcgatttaggctcaaataccatagctctgcattttttaatttttaaaattttttgaggcagggtctcactctgtcacccaggctggagtgcagtggtgtaatcatggctcactgcagcctcaacctcctcgttcatcccacctcagcctcctgagtagctgggactacaagaacacaccaccatgcccggctagtttttgtattttttgtagaaatggggttttgacacattgcccagactggtctcgaactcctgaactcaagcaatccacccaccttggcctcccaaagtgctaggattataggcatgcactacagtgcctggcctgcaattttttttttaaatctgtgcaagcttgggcacattatttaaactgtctaagctttattttttttctcgtttgtacaatgagatgataagaatcctaccttattggcttggtgtatttatcagggtaatgtatgtaaaggccttagcatagcatccagcacagaataaagactgttgctggctattaataataaaaaaaaattctctgagcacctaagatatatcatgaatcctgggtgataatcatttttgctcagagacaacccattaggcccacactctgggtctacatacttttattcttgacagaaatggtttacagtgacgtagccatagttttgacagggagagtcatctggtttcccaagatctagcacaatgggaacccctatgatctcatggcagggactggctaggaccaaggcaactgtcagtaacaaaagggacaatggatggaatagaacaaatcaaacaaagcatgggctcgatgttaggaatctgagggtatttagaaaggggaaaggcaaccttacattcctcgagtccctgaaggcaccactgcagtacaggatagtacagtaattcatgttgatggtgaagtgtgcctcagccttccagagaaaatttacgtatattcactattttaaaataggcagagaacccgttttctattaccaggcaagcacttcaaaaaaaaggttaagatcaacgttttagtgcttgaagacaggggaacttcagttacatgtaaaatccccttggataaaacaagttagcttccaaaaaaactactaagcgtcactatgtttaaaaagcttaaacattctgcgaatcagtactgtataaattaaccactaccacccacaaaagacagtggctacttaactttggtacaaagaatcagggtcagcttgcctgtgatactttaataaatgaaatgtgttgttttctgatatgcccctttcaaatcatgatccaaagaggtgcagtgaaaaacaacagacaaaaaccaacaacaaacaagacttcccacttatactcttctcgatgatggaatttgtggagaattctctccctctctgcgcttgagattccttgatggtaaaatgagggagtctggactagatgatcttcaaggtcccgtccagcttggatgttctgggataaagttacctgacccaactaacaggtacccagtgagtgtccttgctcagcttctctaagaccactttgagctggctgtaggcaccctggagatcctccttcaccagcacggcgtctaccaggtgcccgtaatgccggtctatgaaggcggcagaagcggccatctcttgctgctgctcatcctgcaaggaaaggggtggtaaaaggagcaactgggttgttctcctataacaaacctataacctttgtcttgagcaatgttccaacctttaacttttaagtgatgagtggatgactaggtcccactgataaccaactgtgtacacaagaacagagcatagggacaacatcatgtcaaacttcaaagaaagttaatgggcagtagacacaatcactgttcagtcattcactcacagaatacctcctgaggacctatgaactcaaagccacgataggaagtgcattggggatgctgattctataactgtgtatatatgctaatatcacacttcctgcctcagaagtacttccaaagaagtagtagtattgtgccgcatgacattcagtacacaggttaaataattataagaaagaactataaataataactatataaaaacagagcaaacatttctgcaatcaactggtggaagaaggagaagaaatcattctaatgccctcctgaagactcctaaattcacagtgcagaactcaattcacttcctcacaccagagccaaacactagcacagcaaagtggagttatttaagaaagcactggacaattctaatcaaattccccatttccttagggcagctgatctctttaatcagattgcttttctgacacttaacattaaggtataggcaacaactccatcttacacaatgtgggcactgtttgcatcttcattcaaaagaacctctaataagtattatttcaagtgagtagttgtctgacaattagcctggttttggaaaacaggaaagtggcaggcccattctaagtaaaattacaaaataaaatttgtcgctggcattcactcactgccctttttagttctctgttgctgtctcccctctgcttctaggggctcagtgttttcatgctgccacagggaaagggtgagttctgttctctcccaaagagacctacattccaaatattcccccctcttctctgtcaccagtcaaaacccaattcctacattagtgagagcatctgaaatttcaggattcgagtcctcaagatccaggaaaagggtttggcatgctacttcaaagatagtagaaatgtaagagaaggctgagataatttcttctccttttctcctccaggagggaaaaaattcgattaaattgggagacacttctcaattctatattctatatagaatattcttgcagggctactttcatactcagaagccctatcccgtaactgcccccggatcttcaaccccaccttccccactccctgacacacacccatcctatagacctgtctgctgcttccagtttcccctcctccaggcacccacacggttcatcctggaagcatttggctatttgagaaattacagaaggaaaatttttgccacaaagaaccacaatctacctaataaatatctgcatctggaaagaacttaagtaaatctctaatggagtaaaaacgtgtgacatttgcttagcagtcataaatcccctgaactcctttcctggcctgtaacgatggaactcgcccacctgtgtcttcagcaagagtcacagtcccgaagatcacataggaaagattcccctgtgctgtccgtcacccccaggttggatcagctttgccgggtcagaagccagaagccccattaacttgtggtcagcaaggaaacagaggatgttttgggtcccctaccaggaactcaggtgccagacaatggacagatatttaaagttacacaaaacccatgcctttgtgaggaatttctccaaatgtcatctggggtctgccaacatacatcaaaaccacatgaaaggctgtgtgttaaaaatggagtgcctgggccccactccaaaccccctaggtcggaatctctgggagtagaaccggggactctgtgttgaacagcctcactgtgaccctgctgcctactcacagctgcagtgtggtggagcatgaacgggccagctgcatttcatcatcagcccacctgcttggaatgcagcattctggtgggcaataaaggagatgggatagatgacaaaaccggccaggctggaaggacactgggaatagaatgcagctgcttctcttgaaataacaaccatgggccagggagggttctgaatcctagaaagctggcactgcctgtggacctgatgatttggccttgagtcctaggaagctgcctcttattctcccagtgacttcttgactctttgaaaaatgagccatttccccctgcttattcaatcctgaaatatttgcaaaacaaaacaaagccaatatagtaaaacaaatgggcagattgatcctaaaattcatatggaaatgtaaaggacccagaatagccaaaacaagcttgaaaaacctgacttcaaaacttactacaaagctagtaatcaaagtaagacagtgtggtgctggcctaagaatagacatgtagaccaatggaatgggactgagactccagaaagaaacccttacttttcttgccaattgattctagacaagggtgttaaaataattaaatgagaaaatagtcttttcaaccagtgatgctggggtaactggctatccacatgcaaagaatgaagttggacccctacttcagacaatccacagaaaataacacaaaatagatgacagatccaaatgtaactgctacaactataaatatcttaaaagaaaacaaaggagtaaatctttatggccttggattcgacaatgatttcttagatatgacaccaaaaatataaatgacaaaagaaaaaatagatacattggactttatcacattttaaaatgttatgcctcaaaggatgctatcaagaaagtaaggaccaggcgtggtgcctcccagcactttgggaggccgaggcaggtggatcacccaggtcaggagttcgagaccagcctggccaacgtggtaaaaccccatctctactaaaaatacgaaggaaattagccgagcatgatggcatgcgcctgtaatcccagctacttggaggttgaggcaggagaatcactcgaacctgggagctggaggttgcagtgagccaacaccgcaccattgcgctccagcctgggcaacaagaacgaaactctgtctcaaaaaaaaagaaagtgaaaagacaactcagaatgggaaaaaatatttgcaaatcatgcatctgacaagggacttgtatccaaatagataaagaattcttacaactcaataacaaaaaatggacatttaaaaatggacaaagtatttgaacagacatttctccaagaaagatataaaaatggccaataaacacatgaaaagatgctcaacttcactgatgattagagaaatgcaaattaaaaccacaatgagataccacttcacacctactagtagtgctatgattaaaaagacagacaataacaagggctggtgaggatgtggagaaatgggaactcttgaacactgctgctgggaatgtaaaatggtacagctgccatggtagagttaaacatagaactaccctatgacccagcaattccataccaaggtatacacccaagagaaatgaaaacatatgttcacacaaaaacttgtatatgaacattcataacatgattcataatagctgaaaaggtagaaacaatctaaatgtccattaatcgataaatgggtaaacaaaatgtggtactctatacaatggaatgttattcagccataaaaaaagaatgaagtattgatacatgaatgaactttaaaaacattatattaagtgaaaaaagccagatacaaaaggtcttacattgcatgaatccatttatatgaaatgtttagaatagacaaatttatagtgacagtagattagcagttgcctgtggctaggaaggggctggaggaaaacagataatgggaaattctaatgggctcaaggtttctttttgaagtgatgaaaatactcttaaattgactgtggtagttgcaacaactctgtgaatacatcattgaattgtatgctttaaatgtgtgaattgtacagtatgtaaattttatctcagtaaagctgttaactccccctccaaaaaacacacagaaaacaaaacaaaatttagtcatgagcccactattcagggagaattgcctttagcgttttagtgtattttgtgtgtaacacaaaattagaatcctgattttttattttgatttattttttcttgtatttagctatgtcatcaaatattcctccaacacatggcttttatttatttatttaattaatttatttttttgagacagagtcttgctctgtcgcccaggctgaagtacagtggtgcaatctcagctcactgaaaactctgcctcccaggttcaagtgattttcctgcctcagcctcccgagtagctgggattacagatgcctgccaccacgcccagctaatttttgtatttttagtagagacggggtttcaccatgttggccaggctgatctcgaactcctgacctctgatgatccacccacctcagcctcccaaagtgctgggattacaggcgtgagccaccactcccggccccaacatatggcttttaactggctataatacttcaatacatcctgtaagtgtcacataatggagtatattgaactgagtcctgacagtgaacattatttaggttgtctctgatttttttgttatatgatgggcatactgtatgtttcttttttttgtttttgagatggagttttgctcttgctgcccaggctatagtgcgatggcgcaatctcggctcattgcaacctctgcctccaagttcaagcaattctcctgcctcagcctcccaaatagctgggattacaggcgcgtgccaccacacccagctaattttttgtatttagtagagatggggtttcaccatgttggtcaggttggtcttgaactcctgacctcaggtgatccacccgccttggccctccaaagtgttgggattacaggtgtgagccactgcacccagccaatattgtatgtttctaaatgattctagacttaagttgatattcccctattccccttagagtttcttgtgtctttttttttttagatggagtcttgctctgtcacccaggctagagtgcagtggcgtgattttggctcactgcaggctctgcctcctgggttcaagtgtttctcctgtctcagcctcccgagtagctgggattacaggcatgcaccaccacacctggctaatttttgtatttttagtatgagacggggtttcaccatgttggcctggctggtctcgaattcctgacgtcaggtgatctgcctgcctcagcctcccaaagtgctgggattataggcgtgagccaccatgccagcctcccccttagagtttctaaaggagaaaatttttcttttttctacatttttttttttttgagacagagtctcactgtgtcatgcaggctggaatgcagtggcatggtcatggctcactgcagccttgacctattaggctcaagtgatcctcccactcccacctcagtctcccgagtagctaggactataggtttgtgccaccacacctggctaatttttgtaatttttttgtagagatggggtttcaccaagttgcccaggctggtcttgaattcctgggctcaagcaatctgcccgcctcagcctcccaaagtgctgagacacaggtgtgagccaccgtacctggccaaggagagaatttctaatgttccttgtatgtatgccattctaaataatttactgagaccagatacggtggctcacacctgtaatcccaacactttgggaagctgaggcaggaggatcatttgaggccaggagtttgagaccggcctggccaacacagagacaccctgtctctataaaaaaattttttttaattggctgggcattgatggtacatgcctgtagtctcagctacctaggaagctgaggaaggaagactgcttgagcccaggagttcaaggctgcagtgagccatgattgtaccactgcactccagtctgggcaatacagcaagatcctgtccccaaaaaaataaaaggctgggcacagtggcttacacctgtaatcccagcactttgggaggccaaggtgggagaatcacttgagcccaggagttcaagaccagcctggacaacatagtgagtccctgtctttaaaaaaataataataaaataaaaagtgtatcaacgtggacagttaaaactgagaattagtatgaactaggattgcatcaaaatcttgactcagcgggagcttcctgaccaaggggaaggatccgagaaggcctccttcagatgaaaccagctatataggacagcaagtaaagtctattctgggactgagttgcttctgactgcccccaccacccacaacaacttccaactcattctgctaactgaccctgttaagaaccaaaaaagatgagtcaccaagcccacacctcctggaagaactctgtcaaatatttaggttttgggtgagggtctcgccatcctgacatagactgggctgaacaaagaatctatgacagtgaaacagaagttcatttaggacacatcagacgatctcatccactagttttagaaatcccttcattcactgatgattcaaactggtttgatagcagtgataatgaccttgttagttggggtttcaatttaaaatacttggatttggcctaggagtatagtttgatgagtacagtctgtcacactcagatgaggtccctgacaggtgtcacattttgcgggagggcgcttatgtgagggagtggaggggcgtgagcccaggcaaagccacctgcctggtttgggaggcacttccagctgttcaccttgagccttctggccatgtaatcatcttctcttaagtttttcaataggcaaaatggaaagacaatcacatgtagaaggtgtgtcccgcatccctcttcagctgcaagcacccttatgcagctagaagcgttcctgtaacagcctcccttaggccttcagaaaagaaacaatcaactttaaacttacaaatggggctgctgtgtcctcacaagctggggacataggtggcgtttttcttttttcctgaattgcaggctttacaaatataatatagggtttaaattctgaggtcctcagttgtttcagtgcctgagaaagaaagttcaggaatattatatacttttgaagtgttttgttgtgaaatagacttttgaaagctcaataatcgtgtgcttcaataccataacctcaacagcaaaggtcctggttacatgggtcccatgacaatggacttcaactgggcagaccaactgctccttttctcatccttcactttgacgttgaactcagcggggccctgaagtcacactcactgccaacagaaggttcctaagcctcagctcagagacagttgctgtctctcttagctctgactcctccggctataattaaccttctcaggctcctctccaccttccatttctgatgggtgaggaagcaggagtcagtgtgtatctatttagtcaaatgtcatcaatcggactacattattacaaactttgtgctattacatctcctcttggtattcaaagaagaaaaggtttgcaaagcaaatgagattactgaacagatcatttaaaactgtagactgtagaaactgcactcttgggccaggtgcggtggctcacacctgtaatcccagcactttgggaggccgagccgggtggatcacgaggtcaggagatcaagaccatcctggctaacatggtgaaaccccgtctctactaaaaatacaaaaaattagccaggcgtggtggcgggcacctgtagtcccagctactcgggaggctgaggcaagagaatggcgtgaacccgggaggcggagcttgcggtgaaccaagatcgcaccactgcactccagcctgggtgacagagcaagaatctgtctcaaaaaaaaagaaaaagaaattgtactcttgattaatgcattttatctagaagtaagggctccacttggaaacactagtattaaactgctatatgcattatctgcacccttgatcaataaagtgatcaataaaatcacttttcaaagaaaattttgaaactcagacttttaattttgatcactaactccctgtaagtccaaatgagtgttttcctttataggcataacgtgctttttggaatatatttcaagcaaacttctttaaaataaagcctacagtttatagcataaaatcagagatctgtttctatagaggggaaaaaaaatccccagattgagttcaaagcttggaagtttttctaaaagacaaggttaaaaagatggttaagcccctgctgagtccacagcatgctgggtgtgcaggagtggaaatgtttttgaagcacttcccagggccgtgtctccctccctctttttcccctttaaactgctctcctcactgcctccctgagtggttctctaagccactgactccacctgccctggttggggagggggaggcctggcaccgagagctcagccccagtttcacctgggtactgacatctaattctctggcacattgcaatggccagtcagcgccaccaactattgcatgatctgttccacgcaggagttactagcctgggtctgtgggccaccagagtgtccacaagctccctacaattaatgcagcatttgtggatagaggggcatgttttggggtacaaggctttcatttgattctcaaaggaagacccaaagaaattgaacagccagtgttctagactaaaaattccttagactgaggttaagtgttgtgtaaaatgtacaatcccctagttataaattccgttaaccagaaatggccagcaggcccagcaactcacttctggctccacatccaccaaacaaactttgtttttggccataacagcctgaatggcctccaggctggttccatacagattttccttatattcaccatgttccaggaacctaaaacaccaccaaaggggaaaaggcctttagttcctcagctttcctaaattagcaaagcaaaggggacctcccaacatgacttctctcccgcttcccccatcctttccgggagtcctcccaggagctctagtggaatacagatacaaaaacacacaactgcctggagggccaactggcccatcaagcaacgtacttgttgtgatgtaagtcggcctcaaatgcttgcttagacacaaagtgatattccactccttccttctcatggctctttcggggcctggtggtatcttttaaagaaagaaggaaagctgggcaaagagatgtcacatcacagcacgcagggacagcagcaggcttaggcactcatttgggagttcactgctgctgtgtctaaaccaggcacttccacctcattgcatgtccctgtatcaggcactgtgcctttccaggcaggcgtatcactgattcacacaacaactctttgatgtaggcaaaaggaggcttttccttttgcagctgagaaaactgaggcacggagaggttcagcactgtgcacagtgacccacaaccagtagagagcacagccagaatcggtctctctgccaaatgcccagcttatacccttaaccactctgctaactgactccctgatgctgtgttttttttttgtttgttttgttttgttttttgttttgagacggagttttgctcgttccccaggctacagcgcaatggcatgatttcggctcactgcaacctctgccttctcggttcaagcgattctcctgcctcagcctcccgagtagctggaattacaggcatgtaccaccacacccggctaattttgtatttttagtagagatggggtttctccatgttggtcaggctggtctcgaactcccgacctcaggtgatccacccgcctcagcctcccaaagtgctgggattacagacatgagccaccgcgcccagcatatgctgtggcttttaaagaatcacttaagggacccctagtcctaacttttaattcttcattgttttttattttttgagagcaaaggagccacacatacacttgaccctgatgtatgcttttaattctttagtcaattagttctcatctccagaaaaaggagacaggaagacagaccgtccctatatagatcggatgtgtttcagcaaggctggctctcaaacaaaaatgttgaaacacatggtgttttctcattgatttccataacagaattgggatgcacacttctgaggaaaatcaggtcttctgcagaacaagggcacacacaaagccacacacacagtattttccaaaagataaaatgggatcttgaggcactgtgtcttctggcccatgggaaccacccagggtatgccctgtgttctttctgtggcatcttagtccaacctccggtagaggtgctagggtcacttttccaaccatgtcatccccctgcttaaaaacttgtatttatctatgggttacattctaaacaccctagctgagtatctgagacctgcgtgatctgcccaacctctcagctccattttccagcacaccatccacactaatctccccggtccccaacactgctccgtccctttgcacatgttgtttcctctgtaaagagaactattcctttctcttctgcctggaaaactcctatttactcttcagaacccagcataaaagtcactgcctctgggaaggcttccctgactcccccagtttctaaaacaaaggaggaaagtctcctatctgtggagtgcctagaagcaggtgggcctgaccatccaggtacctcttctccagggggtggatccaaggggttctgaacgatcagtgtgtgagcaacctctgcatgtcctgtttcagtccacctgaaacttggaaggccgtggctccctgaagccctccaggtccatcacaggtgtgctgccaggatggcctccccagggccaccacctcccccacatccctgccacttcagattgggctgtggaagacagctctgacaacccacagactagacgctgggcccaggggcccagggagagcggtgtgatcaaagcaaggcttcatggttgctctgccccagaacactctgaggaggccccattagggcccccacagcacccctctcagtagccaccaggcattcacactgcatccctctgaggccagggggactgagagtgagtcccagaaagaaaaggggcagccaagggcacgaagtgggaggcggcaggtgagaggccattgtgcatcctcgttaagaacatgactggggcaggctgcctgggtatgaatcctggctccaccacttaccaactgtgtgacattggacaagttacttaacctctctgaccctcactgtcttcctctgccacacaagatgataacaatctctcttctcaggggtactgggagggctgacgcagggcactacacataaaagctcttggtgcattacctggcaccttcattctcctcctcctcatcctccttatcacattcagaaccaggatcctctgcccactggagcttgacatcccagggtgcccctggcagcagtaagccccaggaattggcaggggaggcatcacccaggaatgtacccagctaccctgacaaactggaatctggctataagggagtgccgagaaataccactcacagggctctgtggcttctctgacctgccctctcatccaagcagagggcagcggccacaggagtcaaaattcactgtgatgaggaggaatgccccctactgtgggggccccgtggtgtcaggttgaggctgccactttgcctacaatgtgctctggactcatctcccaccccaggcaggaaccaagcaagtggtcctccaacttctgcctcagagggtctcagaggaccactgggagtggatttcttcccatcatgcctttgtcccacaatttgccaatagcaggcagtgcctggtgatcctttaaacccaaagtaaggatttggatggatctggggagttaagtctccatggaatatttgtgtgtgtgcagacaaacacacactcccacatgggccctcttacgtggaacagcgacgccaaagtgctgtgggttctcagccaccaccttttgcttcagctcgtgcagtcgggctcccagagaccctgggaaacaagaagaaggctgaccagggtccctgctgagctccctccccacctgctccagggaggaaaccagatcacttcctggaaacccaggatggcacctaccgatcagaaccaccaggcggggccgctctccgggctggtgttggtacctggccacctcttcgtaagtcagcagctccggagactcagctccggaggacatctttccttcctgcgagccacccagtctctccctacagcccagccggaagctcctccgaagaccagcttgggaggaggggcagagggacaccatggcatttgtcccagttgtcccaggatctcccagtagagacttttcccacctggccagacctggagatgggactgagtcccactgacttctcccaacctcctcctgctactggaagaggttgttcaggaaatacaataataagatgaaagggtgacccctgcattcacaaactagggcttaaggtcactgttttacttggcatgtgactgaccttggacaagtcccttcatctctctgagcctcaatttccttacctgtgaaatgaagatatgaatctacaactactatgtgtggtcctagattagatcctggaccaagggaaaatgtcataaaggacatgatggggacaattgttaacatttaaataacagcatataacagatttggatacattttaaattctcagaatttgatcactgccctgagaaagtccttggccttaggaaatacatgctgagagatttagggttaaagggacacgatgtctacaactaagtctcatatgactcaggaaaaaaaaattcagagatgtgggaaaggaaattgagcaaacatggcaaaggagcaactggtgaatctgggtgtggagtatatgagagttctttgtataattcttacaccttttcagtaagtttgaaattacttcaggacaaaagttaaggggctgggtgcagtggctcatgcctgtatcccagcactttggtaggccaaggcaggcagatcacttgatctcaggagttcaagaccagctgggcaacatggtgaaaccctgtctctacaaaaaatacaaaaattagccaggtatagtggcatgcacctgtagtcccagctactagggaggctgagagggaagaatcgcttgagcctgggaggctgaggctgcagcgatttgtgatcacaccactgcactccagtgtgggtaacagagcaagaccatatctcaaaaaataagtttaaaaaaagtttaaaaactttttagaaaggaggattgcttgaagccaggagcttgaaaccagctgggcaacatagcgagaccccatctctacaaaaaaaatttttttaatcagctgggcatggtgtcagatgcctgcagtcccagctactcaggaggctgaggtgggaggattgtttgagcctaggacattgaggctgctgcaagctgcaatgtcacacactactgcactccagcgtgagagacagggcaaaaccctgtctctaaaaaataaccaaaaaacaaaaaaaactttttgcctatctctaagacctttgaaaaaactgaccaaaacaagtgaaaaggggctctggagagccgcaaacacccctcactgcgtggtagtggtgttaatattgaataaactccaattgcaatgatggtgataatagaattggtattaatgtaggggtgtgtgtgcctttcccgccagggcagtgtgccccacagctgggtaaaagctgggtgggggcccaatgcctgggcaggctcagctcctgcttgggttgagagaactgaggagagatgggggtcccataggctccactgctccagaaggactcctggggctcagatcaccctgctttgacctctccctaactctggggccttgggtggggcaggtcgtgcatgtgggtgtcagggggagctacttacccacatagtgccctttgaggtagccctcacagtcacaggtctctgggaagcaaacagagggagggaagccagtgagtcccaccagacacatccggcccagggcacccagcccctggatggccaggcaggaagagccccctgggatggtgtctcgtggggagctcaggggaaatcccatgtcctggacaccccaagaaagcaaggtcctctgttttgctcagttctccatgcttaggcccctaacagcctttccaggccctgagggggattctaggccagcaggcctccccagtccctgagtgtgagcagtgtgaatagggagggattcactccagcctgccctgccctcccaccccttgtctcctatccagccccatcacagcgtagccgagtcctggaaaggctgggccgcacgtgtcaggagggcagggaggtgcccctaaggccttgaaccctgtccccaccagctttgcctgcctcaaggaacagcccagtccagctggcagagcaggaagaggtgcgcagacagtgggaggggcacagctgcccagatagggaaagaacacgagcccctcaggccccagacgttccacggaaaaggggccacgcctgtggacagcggatagatactgggcctacctttgtcacaaggctgatcatctgcggtttgcacaaaagacagatggaacagcattagtggagggaagcggggaccctgcggctgagggcagccacggcccgagtgcctgaggagcccgccatctggcctctttccctttcctccaacgaacctgtgatctgagctgtggtacgttattaaaccccaagacctgctctaattagtcttcttgtatgtgtctcattagcaccagagaaagccagctcatcagtggcacagcagcctcaaggccactgcccttctaacctgacagcaagtctggaaaagtggccattgtcaggggcccagggagcagcttactctaggatcctgcggtgggaataggacccactctctcttttctggggttggagtctggccctggaaaacgcagatgcctgaggatggagcggggtggagcagagctgcaggccatctgtgttctggtcacctggcacctgctcaggccgctcactcggttacaagtctgccctctagtaccagagagaccatgctctggaaaagcttcctctctgcacggggccctaccctggggctctgatcacaggccttcagaaaatgtgaccccaactctgctcacttaaccttgtgaccctacatattcccagcttagaaaagatagctgactctaccgacttcacagggttccaagaagtaggtggacatgttttctaaagtgtaaagtgctacacggtgtagagttgccagataaaatgcaggacacccacttaaacttgaatttcaaataaacaacaagtaacttcttagtataagtatgcctcaaatattgcacaggacatacttatactataataaaaactacataaaaacatacttatactagaaaccaatctgtcatctatctgaaattcaagcttcaactgggcatcctttatttgtatttgcccagtctggcaatctggcagccctaccagaggcaccaggtcacacatggccttctccattcccttccaacgccagtgcttcttccattttcaaggtcagagagcccttgggaatctaacgaaagctgtggatcctcacacgcacatgcacacgcgtgtgaacacacacacatctgcacattttgggaaagctgttaacataccccccagcatcatctatggactccaaatatacaagctcctctccagggactagctgccccccacctcctacttcccaccccctccttcctctggagtccatgagctcagacaagacccctgatgccccctccagcccactgcctacttcttcccagcctgaatcctccctcgccctaaccccgggccctccctggagtgccatccctgacaatctactcacaggggggcttcctgaggctctgggggctcggcagggtgcccgcggctctccggtagcttagtcgtctgcagggacacaaggggatgggcgggcccgtgagctgggccagataaccacttgaaaggaaccttctggaaaacttgggaagccaaggcctggatcccacaggtgggcacacactggacactctgagggcctcctgcttagcactaagttccaacgaagggaacactttcacagggctcactggctcaccaggaggaagaaactgagtctcttgctccagaaatagctcatccagctcaagatggccacacaggatccagcccggtgtacaatcctcagctggtcattactctcctatggccaatttctaaggagaggcagccccttctctactccccagcctccccatctctgagggagctgagaaatagcagaatgactcccaggagaggccgaggacagaagtgaccctaatttaacaccctcccctcagcggaaggctcagcccgggcagactgtccaatgtggccatgagtggagaggtggggctctcagaggtcactagatttccacatttaaatgcagctgaagggccgggcgtggtggctcacacctgtaatcccagtactttaggaggccgaggcgggaggatcacttgaggtcaggagttcgagaccagcctggccaacacggtgaaaccccgtctctactaaaaaatacaaaaagtagctgggcatggtggtgcacgtctgtaatcccagctactcgggaggctgaggcaggagaatccaggagaatcacttgaacccgggaggtggaggttgcagtgagctgagatagcaccactacactccagcctgggcaagagtgaaaccatgtctcaaaaaaaaaaaaaaaatgcagctgaagagctgtcccccacatcctctggtaagatgttgccaagacctgtgaaccctaaaatggagatgggtctggggttcccgaggagacagagcttcgttctcagacttcggcatctcagaatcgcctggaacatttgttagaatgtgagtttctgggcaggacccatggatctgcatttctaacaagtccccaggtgacgctgaagcccccagccagggggccacaccttgagggccactgaaatgggtgaaccccaaggtcctgtccttaccacagtccacacaccaaaagatgtgagggctacaacccacagtggaagtcacaactgccaccctctgacccaagactgaccttcctggaagtctaaagaaataatttgaaacatgaggaacagtctatgtgcaaagtaagtaagtactgcagccttataaaagtgaagaattgggaacaacctaatcgaagtgcagccacaggaaagcagtgaaatcacttagctagttcctctgagaagccttccctgcattcctggatgagggcgcagcctcctaatatgaactcacacagcaccatgtcctcctcccttgcacccatcacgtttatataaactgtgtgtttgaagagcgtctggcttttccactgaactataagctcctccagggcagaaaccctggattcacagcagcccgcaagatgccagcacaaggccagctcaattcatcctaaatacctgccgcctaggaatgaatggcacagctcctgatgagttagtatacagccactaaaatcacactacaaaaacgatgctataatatggaaaatactcacgccaaaaatgtttaaaaaaaaaaaaagcaagaccccaaattctgtatgcaacactcacataaaaagcacagtaaggaaacaaactatgcagtttagataagggtgagacgtggggaatttcctttcatagtcctcctcttcagtttttttctgtttttttgttttgttttgttttgttttttgagtcagggtctcactcttactcaggctggagtgcagtggtgtgataacagctcactgaagccttgacctttttgggctcaactgatcctcccaccccagcctcccgagtagctgggactacaggtgtgtgcaaccatgcccagctaattttttattttttgtagagacaaggtcttactatgttgcctaggctggtcttgaactcctgggcccaagggaaccttctgcctcggcttcccaaagtgctgggattacaggcgtgagtcatcaccatgcccagcctctcttctgtatttttatattttgtttatcagcattctctgagcatgcattataaaatatacattaacttaggctggatccagtggctcatgcctgtaatcctagcactttgggaggtcaaggcaggtggatcacttgaggccaggagtttgagaccagcctggccaaaccctgtctctactaaaaatacaaaaattagccaggcatggtggtgcacgcctgtaatctcagctactcaggaggctgaggcgggagaattgcttgaacccgggaggtggaggttgcagtgagctaagattcgccactgcactccagcctgggtgacagagggagactctgtctcaaaaaaaaaaaaaatacacacacacacacacacacacacacacacacacattaacttaataacataaatttccatagattcctttaaatctcaaataaccatcatcactagttatgggaaaagaccaaacacaagtgcaactggtacttaccttgggggaacaatgctcagcaggcccctctggctgtgagggcagagacttgggggtctgccatgtacctgtgcctctgccactctggaaccagcccttcacaacataccccagacccacctctcctggaaccccttggaggggatgaggccggctcgaaggttggtgtccccgactcgcttggcctgccaccacgtggggtcgtcctggctcaccacctccaggacctgcctgcgctggaagggcaggcccgcctcctggcaagggatggcccggtcctcccgagggttgtagtggaagagggcgcgcatgaacacctgcacaaggagggctctggtgaggcggcccttccccaagtgagcacagacaggtcattgtcacatcaaaggccacatgacaacgaccatccacacttaggaggaccaagtggcctttcaaatagaaagctacttggaaatacactgcacgtatgttcttaactgttcttcaaccatttgggatactatagtcaggaagtccatcaagaatcagaaaattaataagccccatgactgaatgtctctttcctacctaaatatttccttatttacttgaccagctgtcctcataacagcctcttagcatacacacagcaacaactaatcctgggaacaaaaagtaaaggcaagcacaatttctaactcaagtgttatttttgatacgccaactgcgctgacggaaggcagcagccatctgttatataagtaatctagatgtttgggtaagaacacaaatatcaacaaaactactgttactgactcctcaccatcacttttcagtgggtaattgacacccacagctcttacggctcaatcctgcctcgtctgccatagactcggccaagccctaattcccccctctgctctagagtcaccctctctggagaagatggtgtgaggacacagcatttttcacacttccttgttctcttcgataatttagtggcatggattaactttatttatttctattttcagaccattagggcccaatcacttcagtggcaaacaggaaaaaaaaagcaatcaggggtcttcctcagacagatacaaactctattcctttgtatgccaaccagaaaagattccactggacaacagtaagaactttctggcatatgttgtggggacagatgcccttaaccagccacagatgttaccagggtcctaagcactcagaagaatgtaatcttaagtggccagcccaaatcaagcatctggatcaagaagaaatattcaagaaggacaggctgggggacaggctactcattttgtcctttaggaaaaccaagttctcttcctcaaagaggtttcctcaagtcagaaccctcaaagttgcatgtgcggaccacattcgcttgtcctaggaagaatcactttccaccaggtaagaggaaatattatgccctgggatttaaccaaagagcacaaataagaaacagctatataaagattatttcttcacttgctgtaaaaaactgtcattgaagacgtagtccattacaaatccacattcttcaaagtatcgactgacatctcctctgtgctagatgctgtaatgtttcttctttcatgcattaagtactgagaggcaggtatgggaatgtcttgaaaaactggcatgcttccttccattctctgctcaacagtatgtaattcattatgctctcctttttgccttggctgccaggaaactctactatgaaatcaaagtgatgccctcctctctatctcatcaaccaccatctcacagttcaggtcttaacgtctcacctgggcttttacaagagccttctaccaggcctccctgcctccaacctctacccactccaccctcctccccgtggctgcctcacggagctttctaaaacacaaatataactgcaccactcccatcctaaaaaaaaaaaaaaaagagcttattagaacctatgggattatctcttgggctgtgggatgccctcccatatgccccagggctggaccattcagtgcagcctgggctgacttccagctgccagcacctgcatctctttgcctaaggacttactttctctggccactggaacctactcatctctagtccagcaggcagaagttgctaggaattaatcccccgggtgcagcctggcaggagttggtatatagatcgcccagctcccagggcccctgggtgggatgatggaggcgtgtgttctacaggggaagaagtagttccccaagttcccagcaggactaagctccagctgcccatagtggtaacctgcttgataacacacccttagtcagattggctgtcttccctttcccagtcctgtactggtatttcctggggccacttcccaaataaaccatttgcattcaatccttgtctcagggtcagcttctaagaggccccacactaagcaaggattatgccaaaacccttaacaaggcattcgaggccattcagaacataggcttaacccacctccccagcaaaacccaccaccatcctcccctcaaagccccaccacatagcccttaacgtgctcctctccagagtgccagggagcctctgtatgggcagaccccaccaaggtcctactcgtctttaccttcttcaggcctcagttccaacacccccattctgtgacaccctctagggtgactgtaactctttgtacagaatcttggcaaagcacttatcacatagcaatgaaagacttgctgcccttctgcaccaggaagccttgcagctaccaagagtccctgtctccagcatctggcagagtgcctggcacagagtaggtgaccaaataaggcaggctcagcaacaattaaacaaatggcagttgcttaattggttcagaattcagcacacttggtaccttctcctcctcttcatggccctgagtttctatttcaattaaaataaccttgtcttttattagtaagccacgtcaaatcctgtttagaaagaggcaggatacaaacaaatgcatcactttgtgacggaattaaagtcctccactgggcacagattactaggatcagatctatgatctgttcgcaaatgactgttacaagagactggactggatccagcccccagccagcgagctgcatctctcaagctgagagagggcaccgcggacccacctccccataccttgctctcctttaagcgatcttcctcctgggtggctgggatgatttttagggtgatggatccctgggactgggcctgaaacgaaagagaacagaagcttctcgcctaccaggtctaaccctccaagagttcaactcctacttctcaggcctaaaaactgatgttcagaaagtcagacttgcagcctcccctgaggcccactcttctaggatggtgccctggttgaatgaactaaaacaaaactcagtaaccaagtaactgtacatttttgtattttttagtatttttattatttttaagccagttcaaatttagcagtggcgggttggtaactgtattttcaaaagtcaaagggacggaagactttccatgagaacccaaggacactacgtgttgaattccaattctccatccctcctgaccgctacggccccagagggctcccttccttgcttttctcctgggtcatctgaacaacccatttcggtttcctttgcctctttcctgcctgatttggggctggtctctgattaatacttccctctttgcttccatctccccagtctcaggccatgcccagctttctaggagctcccttcaccctcatctacagagaccctgtagcccaatgccaggggcccaacaaaggaagaatgcagtcggaccaggacagcagggcccaaaagatcacctcctggcctctccactacccagaaagcccagacccttgctctggagcacaagaaggttggcacccaaagccacaaaaaagcaagcttgggcaaaaggactgaagggcctgcctgcaatccgcatcctctacagagagggctttattttgttgttgtttttttgttttttgagatggagttttgctctcattgcccaggctggagtgcagtggcacgatctcgactccctgcaacctccacctcctgggttcaagcaattctcctgcctcagcctcccaagcagctgggattacaggggcccacaaccacactcagctaattttttgtatttttagtagagacggggtttcaccatgttgcccaggctggtctcgacctgacctcaggtgacccacctgcctcggccttccaaagtgctgggattacaggtgtgaactactgagcccagcccagagagggctttaaacagtgggcctcctcttttcagatctcatcctgtttctgcccccaaaaccatcagaagttagcagagtgtcaggtcaggggaggaatcctgaggataaaggggaccaagctatgattggggcttttcacaatttcagttttgacttcaactccccagaatggaccatggaggttttcagccaagcattttataccttaaaatccccttacacttctgaagggctttacccttttccagatgttagcatgccaatgataaccacacattggttgagaaagaaactctatcccaacgttaaaggaaaggaaatggaaactcagatgatctgatggcttgtccaaggttgcacagctggaaggaggcagagccaggattcacacccaggacccaggacccaggaggggccttgtgaaagggaaccaggggaaggaaggaaggctgtgctgaggagaaggtctaagagaggcagatggaagggaagttcccctcctcctgctgccaccccataccccgggcacactgttaggggcacaccataaggccactttgcctgccacctcctcaggacaacagcaaggctaagccagaatctgtcctggctccaggaagtgccttgctctgggtgtctgaagacccagcacatccctagcaggcttgtagcacggaccagaatctggctgatctcgtcgggccgcttgtgcaggactgcgatcccgttcacttctcggagctcatctccaacgtggaccaggcctaggagacacagggactgaccatcagcacaggaggaggacctgagcacccctcgctcagagctccaagcaccacaggggccggcctgagaagcccactgcagggccaactcgaggtttaaagttgatgggtgggactggggcgaactaagccctgctaagtgctgggcacctcactcggcatgcagggctcaaatcacccagtaaaatctccaatttacaagttggcacctgagacccaggaagattaagcagcttgcctaaggccacattgctgagaaataatgaagccagtattcaaacacagttattatgatgtagaaagcctgtgttctttttgctataatctctgcttctttaaaattatcattaactcttagaatggcattcttaagtcttaacaaggaaagacaaaggcaccaatgaagacatcattaagagtgtaaacacactatgagcctctgcctgaatgactaatgtctctgcatattagggccctatatgctactcaaagtgggcactggcccggctgcatcagcatcacctggaggcaggttaaaagtgcagaatcttcggcctagctcagacctgctgaatcagtctgcattttaacaagatgctcagggaattcgtggactcgttaatgtttgcaaagtgctggtctaggattctctgcaacgatgaccccccagactttgggggtaacatcgccctataccaggaggtttgtctcccagcttagtagctcttccacacaccggtgattctcaacctttctacccaaacgaatctggggcacaaacactctctttgtaatagtagcttgacaagacctgggatggtggggaagggtgtcaaccctgtcccacagttagtaatcccgcaagcccatgctatattcttaactgtcacagtccttggactaaaccaacgcatgagctttttctcaatcaccccaaagtactccatgactatttatatatatatatattttttttttttttcttttttttttgagacggtctcactgcgtcgcccactctagagtgtagtggtgtaatcacggctcactgcaacctcaaactcctgggctcaaacaatcttcctgcctgggcctcccgaacagctaggactacaggtgtgggccacccgtgcatggcctatattttctttttctttttttcttttttttgagacggaatttcactcttgttgcccaggcgggagcgcaatggcgcgatctcggctcactgcaacctccacctcccagattcaagcgattctcttgcctcagccttcccaagtagctgtgattataggcatgtgccaccaagcctggctaattttgtatttttagtagagatggggtttctctgtgtgggtcaggctggtctcgaactcccgacctcaggtgatccgcccacctcggcctcccaaaatgctgggattacaggcgtgagccactgtgcctggcttttttttttttttcttttttttttttttttgagacagagtctcactctgttgcccagactggagtgcagcagcatgatcttggctcactgcaacctccgcctcccaggtttgtgtgtttagtagaaatggggtttcgccatgttggctaggctggtctggaactcctggcttcaagtgatccgcctgcctcggcctcttaaagtgctgggattacaggtgtgcaccaccatgcccagctggcctatattttctattaaaatttctactgacttgggaaggagatgagaattccagccacaaccccagaaagcaaagcaaatcccaaacaggtgacctgataggagggaggtaaggggacctattagcaaaggtggagggctctggaacaatggccatgatcggggctgggccagctttgcactgccgccactcaccgctcctgtctgctgcgcctcctcgcatgatcctggccaccacaacagcccctgagtgctcgtcccgccggatggtggcaccctgaacccgagacagaagagacaggttcttaagcagcagctccaaacctcagacccctactctctggacccaacacagcctccccagtccctccctctgacagtccagagagatcagtggggaccttcccaatgctgaagacaaaacaaaaccaacatcccccattaatatagccctgcactgtacagtttacaaggcacaataatgctgcaacattttagatgagggactggggctcagagaagttaaatatcctcaaggtcacccagctggtaaaggggaaagctttttgtgatgccaaatccagtaagttctccatcacatctctctcatatcacagttcctaccacttgcaaagacatttaataatgaggatgacacgtgccagctaattctcaccctgcctctacccaatcacagggttaccgggccttctgctgctgctgagggaaaccaattatgcaccccagccagggcttcgggaccaggacttggcccatgaagcacagcagagatgacacttaggatgagaaaggcactaacgagccctcgatttcctgcaccacacaggccggactgcagcaggacggcagaaagcttaagagctaagctctagggctggacagccttgggtgtgaacacagttctgccgtttacaaaaagcatgtggacttaacaaggaaatctcttatcctctccaagcctgtttcctgtgagatgtgggacagcatttaactcacagtgttgttgcaaggattccactcaaggcacttagtacacagtaagcactcaacatatgttaaccacttattagtggctgtaactgcaaacacatttgcacacttattgttaacatcatctgtgccatctatttgaagtacgtaagataattattgctagaaagagaggccatcagctaagaacctcaggacttctagccccccagaactgagaactttccagcatcgctatccatcatttattcagctctgaaccgccagcacccaatacagagcctggataggagggctcacaatgtgtttgctaaatcaatggatggccactccattttacaagtgaggaaacagaggcagaggagagatcctcgtctgtttgcagaagaggctcgtcggaggtcatttggggaaagttggaaatagagaatgccagctgtgggatcctctggagccaatctcaattctctgggcttccaccacttctgagcatctcataaacaacgctgtccctttgctcggtaaatcaatgctgaaccaggaccaaagtgatagcagtctgtctgctggggagaggaatgccctgtgcttcctcaacattcagagcaggcattgtcacacgttttctataaggggccacatgtaaatatttgaggccagccacacagtctctgtcacaacgactcaactctgccatcgcactataaaggcagccacagccaatctgtaagtgaatgggcctggttgtgctccaaaaaagctttattttaaaaaataagctgtgggctggttttggcccttgggctgtagtttgtccatttctggcttaaagcatgatcagggtcaccctgtacaattgtgcaggttattaactacacaaagggtgttggccacagttgagaggggctgtatccacctagagaaaggggtgccctgcacacagaggcaccacagggatgagcagcagcgcaggcaaagctgccgtcactcactctgaagacttcggggaggatcttgtccagtgttctgggtgggggtgagaggcaggggaagagtgggttagagaggggcaggcagcagcacctaccaggggttccttgttcttcaccaagcggacgatcttcaccgattcctcatcaaaatcctcatcgatattgtcaggcagaggcgggagaacggggtcaaaattcttctgggcaaccgtgtcatgtaccatgagcacagcctgccgggaaagccagagaaaaggaaggctggcccgccgctcacagggtcagcaggccgcagctggccggtggtatggagggtggcagacgccatgccagagagacaactgcccagacactagtgctgaggatcgctccctcagtctccactcctcagcctcattaggagagctccctccgcccccatcccaggagacccagaggcatggctgggcaggggctctgtgtgactaccctcaggtgcggggtggacagcagctggagcagctccctctcatcactgtgcacggaggcggcctgcaactcctccatcacctgcagagaatgagacaggcgccactgatggctagaggtgcccctgccccatatctgctgggtccttcctctttggaagggcccacccagctgcagcccccaggggcacaccagaccctcaaccacccgacgacgatgatcctgggaacatcacaccaggggtcaggagcagctctatggggccatcctccaaggagccaccgttttaagccctacgtgctttctgctttatgtggatcttctcactgaaccctcgcaaccaacttgatgcagagggtcttgttactttgccattttacagatgagaatcctgagactcaaagagattaaacattttgcccgaagtcacagagctcatatacagcacagctaggatttgaacctgggcttatctggctctcagatgctattttatgaatgaggaaatgggagctcagagaggttgagtggcctacttaacatcacagagctggtgggacaggcagcgctgagcctgggagccaggcaatctaatgtgcccctaatcacattccacagtggagaagggcccagggctctgcacccacaagctgcactcatccctccccaggccatctcctggggttaggtgagtttattcaggaactgatcttagtaatcaaccagaatgggttttccccaaccacgcaacatagacgactaggtccacaagaaattaagaagcgttcctttaaaaaatgagaagcctgagccagtatgcggggacacactgtaggtcccttgacttcaggaaagcacagacataatgtcttattgacctattcaaatcaccagtcctcagggcagtttgggaactgctgagccaatccaatgctctcatttacagcagaggaagcagacttgctaaagaacacacagtaagtgggcagctccatgtcacagtgtctcccagcccagtccaaggctcacgggttcctccctacctttcggggaacccagagagaggaagagaaggaggaggacaagggaagaaaacacctcttcacctttgggctcctgattcccggtgtccccacactaagcaagcgaggcaagatgaaggagccctacagggtggggagtggggcagacactgtaaggagaaacctggggcttacgtcctcagcgagggccacagcgctgtgcagaactggggttggactttgcctttcataatagcgaagcttctcatgaatctgcaaagacagagtatttcagatgcaccctggacaccacacatcccacccacggctgtggggacatttggggcagcagactgggccactgacagggcaccataagagaaagtcctgtgtagtgggcaagtgaaggccttcctggggcagggagatgactaggatgacctcagacggccacagacagctagaaagacctctagacacccttccacgcaggatgacgtgggacttcaccttcattaagtaactgaggcttttttcactgaaaacatccctcaggaagcccatctcctccttgtggttggagtcaggtctgagctgggaggtcagcagggccagggtttcatgcaaacctggggagaggtgagaaaaacaaaggatagcaaacgcagtgggtgctccctgcccccgaggagcccgagtggggcctcaaacagcacttcagtcctgccgtgaggacattctctccccaggctctcactgccagggcctggaggctgccaggcaggctcttgtcttcaggactgtggcaggtccagccggggggaggtacttaccagagtcctccgatagcactggcatgctggcgttgtcacctcccgacctctccctgcagattctgggagaagggggtggaggtgggtattgaagctccatcaagcatatttattgaacaaactgactacacatctactgtgttctctgagaccaggctgtggacagagaggatgggaacaaataactctgcttacttttttcagagaggaaggaaataaagctaagatgtgctgagtgtcctcgatgtgccaagcattgtgtggggtgatttctatgataaactttttgtctgcacaaagtcctgagaaatgactgcgaatgttcccattttattgatgaagaaacagcggcgtggaagctttcagtaagctgtgggtcaaaatccatattcaagcaggctcttccaggctggccttggaggtgccaagtgaccctgcctgacagtgtcagctgtcctccgcagcgcgccccctccactgcaaccttctaagagccctggctcaagtctcctgctgggacacaccttccacaactacctggctgggcctacaagccccctgtccccgaccccccaagacccaacccaaagggagcctccagactggagtgcagagaggagggggggaaatgggagtcgggcttccactatgcaggaggggggacccctatctcatgaggccctccaaaggtgctctgcagcacgtggacctcaaaaagtcctccttaggaagaggagaaggagagtcatgactgattcattccgcaaacatggagccagcccgcagcgccgagccccggtgccactaagaggcgtaagagcggccccgggccctccagcctccgccccgccccgccccgccacgccacgccggactcaccctcgggctgctccccgcaggaggccgagcaccgactcccgctcgctctccgaaggaacctgtgggagaacaaggagcgcactgggcgcaggagcagcgaccccgggggacctcggagggcggtcccggaggacgcggagcagcagggagcggggggcgcgcggcggggcgggcgcgggaagagggaggcgggggccgaggggcggggttgagactcccgcggtgggctcggtgggccgcgaggctgtccgggagcacgggaggagggtctcggcccggcctcccgcccctcccgccgcggcgcccagctccctcgtccgttcccctcgcggcctcctacctcgtcgcgccgggatgtgtgctccgcgaacgggagccgcgcgagtgcccagagcctgggccgccgctggctccgccttcccggacccctccctgcggctgccgcgccgggcgggggtggcggagcctgaggaggcgcggcgcggggaggaggcgcggcgcggggaggaggcgggggaggagcggaggccgccctccgcgtctggcaccgccgcaccctccgggccgggctccgctagccggcgtcgtacccgctcccgctctcccgctccctgagtcccctgcctgtgtccccccgcaccctggcacacagccagacttcccttccgcccgcgcaacccaccctccgcgagtggaggggtggacacctgctcaacagagaattcgattttgcaaacatttattgagcgccctccaggtgccaggcgctgtgccaggggccggggcttcaaagacgaccaaggcacagatcctgggtttgaagatctccagaggtggggcggggggccggtcggatgcgagggcaactcgctgtaacaatgcaacgcgctgggaaagatttatcggtgcacgctgccctggggacgcggagcaggggaggagaagtcaggctggagaggagggggactccattctgcccggctgcaggggagtgaggctacatagcagaggcgagcagcatccaggggctttactggaaaaagagctctgaaatggccatgacgataactgacttatattgtgctgtctccatgcccaggtactcctcagatcacttcccttcacagtagttcctgatatcaagaccattcttattttggttctgcaattgaggaaactgaggttcctggtgaaagaatgtgtataggggagagcataggaactgctgggtgagtgagcaggtggttgtgggtattaaaaggtgaggagtgggtgagtgagtgggcccccttccctcaatcccagcagcaaagaacggcacagcacatgtcaggagaggtggacccagaggttaagtctggaagtaaatctagccctgcacagtaaccagggaaaatgggttggcaggccccacaggctgtagtgcatggggaggctgtgagaggcagcaaatgtcatgatgatgtttcccctcattcctcaaaaattatcctcattcctcaagaaatatctacactattgctcctcaaaatgtaacgtgcctgagactcactagggggttgtgtaatgctggagtggtgccagattctgaatttctgacaagctcccaggtgatgtgacgccactggtctgcagaccacactttttgagtggagagagactgcatgagacacattcttagctgcaatgtttactgttggaaaaataatgagaaccatctgatccatctgatatgggtcaaatgattttggacaagaacaccaggaagtggtgttggaacaagtagatatttatgtgcctgaagggacccaatccctacctcacaccatattcaaaacgcaatttaagagagatcattggcctaaacataaagcaaatcgataaagctactagaataaaacaggagggtatcttttaaatcttggggtatgcaaagatttcctagaaaggatacaaaaaagccaggcatggtggcatgagcctgtatcccacatactcaggaggctgaggcaggcaaattgcttgagcccaagagttcaaggctgcagtgaactatgatcagtccactgcgcttcagcttgggtgacaaagagacaccgtttctaaaaaaagaaaaaatttttaaaaaaagcatggaccctgaaaacaattgataaatggacctcatcaaaatttaaaactcctgctcatcaaaaaacactattggccaggtgcagtggctcatgcctgtaatcccagcactttgggaagccaaggtgggtggatcatctgaggtcaggatattgagaccatcctggctaacacagtgaaaccccatctctactaaaaatacaaaaaattagccaggcatggtggcacacacctgtgtccgttccagctactcaggaggctgaggcaggagaattgcttgaacccgggaggcagaggttgcagtgagccaagatcaggccactgcactccagcctgggtgacagagtgagactccatctcaaaaaaaaaaaaaaaaaagaccgggcgcagtggctcacgtctgtaatcctagcactttgggaggtcaaggcgggcagatcacgaggtcaggagatggagaccattctggctaacatggttaaaccccgtctctactaaaaataccaaaaattagccgggtgtggtggcggaggttgcagggagtggagatcgcgccactgcactccagcctgggccacagggtgaggctccgtctcaaaacaaaacaaaacaaaacaaaacaaaacaaaacaaaacaaaacactattaagaaaataggaccagggaccaggtgcagtggcccacacctgtaatcccttcaagcactttaagagttcaaggcgggtgaatggcttgagcccaggagttcgagaccagcctgggcaacacggcaaaacccagtcggtatctactaaaattacaaaaactagccaggcatgttggcttgtgccagtagtcccagctgctcaggagactgaggcaggaggatcacttgagcctgggaagcagaggttacagtgagccatgattgtgacactgcactccaggctgggtgacagagtaagaccctgtctcaaaaaaaaaaaaagaaaagaaaagaaaaaagaaagaaaaggaaaggaaaagaaaagaggcaagccacagactgggagactaggaagaaatatatctgacaaagagattgtattcagaataaagaactcctgtaactcaataaaaagacaaaccacccaatcaaaaaacaggcaaaagatatgaacatgcacttcacaaaagaagatatacaaataaccaataagcatatgagaaagcactcatccaacatcatttgtcatcagggaaatgcaaattaaaacctgtcatagtcagttcctgctgctataacaaaataccacagtaatttataagaagtaatagtaatttattgcttacagttctagaggccggaaagtccaagatcaaggggccagctggttcagtgtctggtgagggcctgttcctcactgatggcactggataggtatcctcacatggtggaagagaaagacaggcataggccaggcgcggtggctcacgcctgtaatcccagcaccttgggaggctgaggcaggtggatcacaaggtcaagagatcaagaccatcctggccagcatggcaaaaccccgtctctactaaaaatacaaaaaaatagccaggcgtggtggcaggcacctgtagtcccagctacttgggaggctgaggcaggagaatggcgtgaacccggaaggcagagcttgcagtgagctgagatcgcgccactgcactccagcctgggcgacagagcgagactccatctcaaaaaaaaaaaaagaaagaaagaaagacgggcataaagggatgaacgctgtgtcctcatgtggcagtaggggccaaagggactagggtgctcccttcaagttctcttataagggcattaatcccattcaagtgtccatcaagaagtgaatggataaatattcattcacttgtggtatatccatacaatggcatatttactcaccaataaaaagaaacaaattacaagaaagaaatgatgaaaaaatttaagatggcagagtatacaattgatattaaaaatttatgactttccggccaggcacggtggctcacgcctgtaatcccagcactttgggaggccgaggcgggcagatcacaaggtcaggagatcgagaccatcctggccaacatagtgaaactccgtctctactaaaaatacaaaaattagctgggcttggtggcacgtgcctgtaatcccagctactcaggaggctgaggcaggagaatagcttgaaccagggagtcagaggttgcagtgagccgagatcgcaccactgcactccagcctggtgacagagcgagactctgtcttaaaaacaaacaaacaaacaaaaaaaacattatgactttcctgtggacaaaaataattattaagtataatgaaagaaaaaatccaaactaagatatcaagaaagattaaataccaatttataaacttaataggaaaaatgaaagacctattgatatttgggagaaaaaaactttaaaattctagtgaaggacataaaagataaaatgtacctcaaatggctagggaaagaacagttcaatagtgcaattatattaattcattctgaaataatctttatacccaatgcaattccaattaaaatataagaagtatttttcacagagaatttattaaatgctaccacaattcatcaggaaaaataaacattggtgaataataggaaagttctgggaaaaaaagagttatgggaccaagggaggtgggatttaaaaatatgaaaacaatttttaaagtttagtactgaggctatagtcccaggactctgggaggccgaagcaggtagatcacttgagcccaggagttcaagaacagcctgggcaacatggcaaaaccccatctctacaaaaaatgcaaaaattatctgggtgtagtggtgctcacctgtagtcccagatgctcaggaggctgaagcagaattgcctgaacccaggagttcgaggctgcagtgagccatgaccacaccactgcactcaagtctgggtgacacagcaagaccctgtctcaaaaaaaatgaattaataaagtttagtactaaagaggcaatcaacagctagacaaatagaacagaattgaaagaacagaaatagtcctcatgtatactgtcttttaatatttgagaaaggtgacatttaagtggaaggagaggaatttttttttttttttaatgtggggacaggccaggtgcagtggctcacacctgtaatcgcagcagtttgggaggctgaggcgggaggatctcttgagcccaggaattcaagaccagcttgggcaacatagcaagacctgtctctactaaaaataaaaaaattaaaaaaaattgatgcatgtgcaagtagacccagctactcaggaggctgaggtgggaggattgcttgagctcagcagatagaggttgcagtgagccgtgatcatgccactgcactccagctcgggcatcagagcaagaccctgtctcaaaataaaataaggtatggcgacaattacaatagctactctttatgggaaaaaaaaagagagaggaaaaaaggctgggcgcagtggttcatgcctgtaatcccagcacttcggtaggtggaggcgggcagatcacctgccctcctctgcaagattataaaaataaatttactgagaaaatattttgatgtgagaagtgaggtagggatacagctttctttcgcttttgttttgagacggggtcttgctctgcggccaggcgggagtgcagtggcgagatctcgtctcactgcaagctccgcctcccgggttcaagtgattctcctgcctcagcctcctgagtagctaggattacaggcacccgccaccacacccagctaatgttgttgttgttgttgttgttgttgttgttgttgtttgagacggagtctcgctctgtcacccaggctggagtgcagtggtgcgatctcggctcactgcaagctccgcctcccgggttcacgccattctcctgcctcagcctcccgagtagctgggactacaggtgcctgccaccacgccaggctaattttttgtatttttagtagagacgggatttcaccgtgttagccaggatggtctcgatctcttgacctcgtgatccgcccgctttggcctcccaaagtgctgggattacaagcatgagccaccgcgcccggctgcagtgagggaaacatttctaagtaaattccaaatccaaatctataaaggaaaaggtggatatgtgtgatttaaaaaagggtaaacatttttataggtaaaaatattatttgcaacatatgatatcatatgcaatatgataaagttaaattcctcaatttaaaagagtttacataaatgagaaaagatgaaaaaattttaaacggtcaaagaaaatagtctaatacaaaaaatacatagccaataaacacagaaaactgatgctagatctcctgtttaaaaaaaaaaaaaaaggaaaaaaaatccaaaagatgcacaacctcactcataatcgaagaattcttagccaaaataggaggcaatgtcccttgttaagacaaaaatgtttaagtctgttgacatccagtgctatcaaggatgtggggaaaagacacatttacacatttggaaggaatattatttggtgcaaactttctgggacacgatctggtaatatttgttaaaatattatatgtacatgtcctttagtccagaggatatttgggcaagcagaatggaagaaaagagaagcagagagagatgtttaggtggatgagagcttggagcaggagtgctgggagaggctgcatcataggacagggcaggtgcagccagggcggagttggcccagatggccggaagctcagggcaggagtcgcctcacccagccagggctcggtcaaggtgctcgtttagagcagctgcacagggaacaggaagatgagctcaatgccagaggaatgaatgactttgggtccatctggacagggagaagagactttaccaagcatgctctggaaaaaaagagaatgccaacgatccttgaagaggtgacagagagaatctgcttcaggctacaggtgtgcattgtcattgcatttggcattcagcccagacaccatagggaaccagaaataattccaagaggagcaatgggctagtgcccaggcatgcagcaagagggcaagtcagaagcgggtggagaaagggcaggctcagctccatttacttctcaatgagaagggaaattactgtactggggttttggggtttttttgttttgttttgttttttgagatttctgataacttttcctattgtttgtggcttttgttacctatttctcttatttttatttttgttttatttttttgagacagagtattgctctgtcacccaggctggaatgcaatggcacgatctcagctcattacaacctccgcctcccgggttcaagcgatcctccagcctcagcctcccaagttgctgggactacaggcatgcgccaccattcccagccagtcctagaattcttatgttgtgcttttttcaaatctgctgtcactttttgttctttccagttccctgccaaaaatgtcaagcttgacttttacctccttgagcacagtaagaatagttgtgttaaggctgatcctgctatttacagtatatggagtccccacgggtctgttttgttgtttctgcatattcttgcttattgagtcttctcatagatttggttatctttgattatatattagatggtatttgaaaaaactacttgtaaaaatgatcagcttaggctgatgctattttcctccagaaaggatttttcactaatatctttaaggtacccgagggtagggatggggaaggtgctgccagacaagagccacttttaattcaagttcaaagcttgaagtttcctgggacacctaaatgacagaaagctgggtggaagtccatggtggcctggtttgtacagccttttggggtcccagcctaatgtgaccaaaaatatgccagattccattccctgcccccagagggccctagactcctagttcatcctcttcgctgctgctttggaatcagtaaatgcccacagggaaaacaagcacatacactgagcttatctttctggcttcctgtctacttgcatgcagacttatgcctgggaacccccatgctctttttagcttttcactgctttttttttttttttaagacagtctcgctctgtcacccaggctggagtgcagtgacatgctcacggctgactgcagcctcgacccctcaggctcaagtgatcctcccacctcagcctccccagtatactttcttttttcttaataaactttatattttggaataattttagatttacagaaaagttgcaaagatagtacagagagttcctgaacaccctttcccctgttttctctaatgttagcatcttacataatcatgatacatttgtcaaaactaagacatgaacattggaatgttattattaaggaaattccagactttattaatctttcactagtttttccactaatatcctttctctgttctgggatccagtccaagataacacattgcagttagccttcaaagtttctgagaagatttgaaatttacctatcagtaaacgtgggcatttactgattgagctcctgaggcattaccagtctcccattactgccctcctccatcattttccctgtcattccccgaagtaattggttaacataaaaaatttgaaaggggccgggtgcggtggctcacacctgtaatcccagcactttgggagaccgaagcaggcagatcatttgaggtcaggagtttgagaccagcttggccaacatggtgaaaccctgtctctactaaaaataccagaaaatgagctgggcatggtggcacgtgcctgtaattccagctactcaggaggctgaggcacgagaatcgcttggacccaggaggtggaggttgcagtgagccgagatcgcgcctgctgtctcaaaaaaaaaaaaaaaaaaaaaaaaaaattgaaagggagttttcagatttgtttgatggagaaagttgaaaaatcgagtttgcaaccagctagggtagggaagctgcgaggagactagaggatgaatgtatgacggaaaacaaaaagcatggtggtggtctacactgtgctacagcaactagcaaactgcaagatctccgtggctaaacacagaaaagtctatctcttgctcattccaagtccgccgcacgcttggtggctgtccagggcagctgtcttccaagtggtagctcaggaatccaaatcttcctgtcttgtggctcatttgtctttgccggggacacgtcttccccactcctgatgtttccttccatgagcagagaaccccactggcacaaaactcttagtctctctccacgcctctctctacgcctctccacacctctctctacgcctctccatgcctctccacgcctctctccacgcctctccacgcctctctccacgcctctccacgcctctctctacgcctctccacgcctctccacgcctctctccacgcctctccacgcctctccacgcctctccccgcctctctccacgcctctccacgcctctctctacgcctctccacccctctctccacgcctctccacgcctctctccacgcctctccacgcctctctccacgcctctccacgcctctctccacgcctctccacgcctctccacgcctctctccacgcctctccacgcctctctccacgcctctccccgcctctctccacgcctctccacgcctctctccacgcctctccacgcctctctccacgcctctctccacgcctctccacgcctctctccacgcctctccacgcctctctccacgcctctccacgcctctctccacgcctctccacgcctctctccacgcctctccacgcctctctctacacctctccacgcctttctccatgcctctgctgatttgattgatgaatgttgaaggaggaacaaggcgtgtgtaacccggctctcttcttccttttctctggtgagctggcccacctgcaaaaagtgtgtgttctaaactgatacaccacacctcaccctgagtattacgaggatggcccagctccactgaggaaagaaggacgcagttttacctgattctggggttcagcattaggttctgcccactgtcctgtttccaaaaccgtgttactatgcctgcatcaagcttatccacccgcggcccacgggctgcatgcagccaggatggctttaaatgaagccccaaacaaactcgtaagctttcttaaaacattatgagattatttttttaactcatcagctatcactggtgttactgtattttatgtgtggtccaagacaattcttcttcttggcccagggaagccaaaagatggaacaccctgacctacataaacaataaacataacttacacaaaagtgcacttatttgttccacagttattcatcatctaagacagcagttctcaacccagggtatttttgcctctcagtgggatgtttgacaatgcctggaggctttttttttttttttttttttgagacagagtcttgctctgtcacccaggctggagtgcagtggcgtgatctcagctgactgcaagctccacctcccgggttcacgccattctcctgcctcagcctcccgagtagctgggactacaggtgcccgccaccatgcccagctaatttttttgtattttatttttttagagacggggtttcaccgtgttagccaggatggtctcgatctcctgaccttgtgatccgcccaccccggcctcccaaagtgctgggattacaggcgtgagccactgcgcccggcctttttttttttttttttttttttgagacaaggtctcactcccatcacccaggctggcgtgcagtgatgggatctcgactcactacagcctcgacctcccatgctcaggtgattctgtcacctcagcctgtgtgtagctgggaccacaggtgcacactgccatgcttggctaattttctgtattttttgcagagacggggttttgtcatgttgcccaggctggtctcaaactcctgggctcaagtgatccactcaccttggcctcccaaagtgctgggattataagcatgagccacctcacccagcctggagacatttttgattatcacaactgggaagggactactggcatctagggggtacagctggagatgctgctaaacatcctataattcacaggacagtctcccacaacaaagaattatctaacttaaaatgtcaacagtactgaggttggggaaaccttgatctaagaggagcaagtgaccctcttggagcagctgaagtgatttagtccaagtccaaaccgagaggaattggaccagggtggccatcgaagaccaagcagctcagtcccctcatccctgccactgtacctcttgggcacacagaggccttcctgaggatgtgatgaggctgtcacgagcccagtgacctgtccaggagcccttgtgcctcattgcctctcccaggtgcagtgatggtggggcacctccccatgcttctggtgggaagcaggacaaaaatatcctctcttctcagatccccagcccaccacggaggtctgtctgttggccccatctaccccagagtgtggcctaaggtggaactaggtgcgaggctcatgccagcacctcactttcacccttctccccagcccttgctccacttcccagtctggtgaatctgtttctaatggagttcttgagccagcctcctgggctaggtgtggggctgggaaatggaggggaaggaccttcaaatatgcaggaagagggtagggatccactcaacatgctctttatataaataaacatttaataacacctcgcttactctcctaaaatgacaatcataaataatatgccttcacaagcacttacttctttaaaatcacactatagtgcctgagctatactagggagaaaaaataaaaggaaagcaatttataaccaaataacacatatttcaatctgtcagtgctcaggtcccatgacactagaaagcataatgaagtgtcagatgctcgtccttgcatataataaataagtctgaatttaagaaatgtagaggatcagaaattattctgtgtaaggacaaaaataaataaatagaagagcaaagatatgctatcaaatgctagaataagtattactttaaggccgggcatggtggctcgtgcctgtaatcccagcactttgggaggccgacgtgggaggatcgcatgaagccaggagtttgagaaaagcctgacaacataacaagaccctgtctctactaaaaataaaaaattagccaggcaacagtggtgcacgcctgtagtgccagctacttgggaggctgaggtgggaggatcacttcagcctgggagtttgaggctgcagtgagctgtgatggcgccactgcactccagtttgggcaacaagagtgagacctgtctcaaaaataagtaaataaacaaatacttttttttctttttttagatagaatttcactcttgttgcctaggctggagtgcaatggtgtgatctcagctcaccacaacctccaccttctgggttcaagcgattctcctgcctcagcctccctgagtagctgggattacaggcatacaccaccatgcctggctaattttatatttttagtagagactgggtttctccatgttggtcaggctggtctcaaactcccgacttcaggtgatccacccgcctcagcctcccaaagtgctgggatgacaggcgtgagccaccatgctgggccataaatattttttaatctgtgtttttttaaaactgcaaaaacagatcaccttttgtagtctgtacatgtaaaagagagtcaggggctgagatcatggtaacagttttccccaccgtgaacagctggccctgcccactaaatggcagcagtgcttcgcagtcattgtgaaattaaaacacttctccccacgttactagactcacacacacacaatcttccctcccagaaccactgagttaatgcttcagatattaacctgacaagtcagtaaaattccaactgaacatttggaaggatatatgccaaaatattaatggtgcttttctaaagcagaaggggaattacaagaagcactcccttttttctttctttcctttttacgttctgtattgtgtaaaattttgcttacaacctgtatgaactttgcaaccaaaccaaaaaaaaagtcatttttgaagccagtgtgtcagagctcccagtagtgtacatgtttgttttggtcctttcaaggaggattcaagtctgcgatggagaaaccaccaattcactttttcaaatgccaaaacaactccgcaggcgtggaggagacctatcttgcagcgctgtaggcccaaggcaccagggaatccggtccagctcagccctacagctttgctcagccccgtctgcaccgccgccccgtggccaagggcagtactgcgtcctccaaaaggcaagggcggaggaggggccaggggccttgccccaggggcaagcttctttctgtcccactgaccacatggcagtctggtgaagtttatggacccctctctcagtataatggcgggtaaatatataaataaaatatatatgctggaaagaaaactaatactggtgagatgattcttaaaactctttataaatgtgtaatataataatagccgtttcattattgtaaataaccagctctaggggcaggtctaggaactcattgttttccaagcagtgaggggtatacacgacgtttcgagatatccacaacttgatgtgccagtgtctgtgattgtaattggtaacaaagttgcaggtactgctaacagtacactctgaataagaggaaaagctaaatattagaagttgatgaaagtcaatatgtaactttttcccatgcgaattcgacttacagaccccttagggcgcacggaccacaggttaaggcccccttgaaggggcacgagtttaggagaaactctggtgtgggttttcagtcctggaaggtgagccctggggtaggcacgcgtgggcgctcagaaaagggaaggcagaggcgcctccccggctgggcctgcggagggatgacccacacgcccctcccctcgcttccttggcctggtttcacgcgactagagaaagttaaagacccgtgtgactgaagaggagctcacagttcccagcgtctgctcccacggtgtccagcgcccagaatgcggcttctggtcctgctatggggttgcctgctgctcccaggtgagatggggagagggtctcgggagggatgtggggctcacccttgtggtctgcagggaaaggacctcttgactgactgatagccccaccccacctatcctcagcctcctcagccctaggggagcggggcgggctgggggtggggggaggtgggggtggcgccggggccgcacttgctgtttctggaacctagagccaggttttctccagacctgtgggtttcccctcatggcaatgtggctgtgagagttgctttgcctctctaatcttaatttttctaccctgtgccaagcctggaggcggacaagacaccccatctggttgccctgttaaactcagcaaatatttgttgaatttcggctatgcctctccccacaaccctgaaagatgaagaattatcacgtttcatcaattcttttgctttctttttctttaccttctaacacttaaaatcaggataaatcctacaactgatgtcagttgttcagttggcaatagtgagaccccatctctacaaacaaacaaacaaacaaacaaacaaaattagccaggcatggtggtgcacacttgtagtcctagctagtgggaggctaaggtgggaggatcgcttgagccccagaggtcaaggctacagtgagccatgagcaccattgccctccagcctgggcaacagagtgagatcctgtctaaaaacaaaacaaaaccaggcacggtggctcacgcctgtaatccaagctctttgggaggctgaggcggacggatcacaaggtcaggagatcaagaccatcctggctaacacggtgaaaccccgtctctactaaaaatacaaaaaattagccgggcatggcagcacgtggctgtagtcccaggtactcaggaggctgaggcaggagaatcacctgaacccgggaggcagaagtttcagtgagcagacatcgggccactgcactccagcctgggcggcaaagtgagactccatctcaaaaacaaacaaacaaacaaacaaaacaaaacaaaacactcagaaaccctgctggctatctggctgtcagattctatctgaatctagaacgccacccctgcaccccaattcctcaatgggccagggttagggaaacagcaacagccctgccccaagttcccccagcgtgggaggttagtaatggctcttccaaggctgtccccagaagggatgactgagaaaagccttccttcttcctcctaaaatggaagctctggccttgaccttggtacatggagcctggtttttccaacctccactcctgctctgattttaggttatgaagccctggagggcccagaggaaatcagcgggttcgaaggggacactgtgtccctgcagtgcacctacagggaagagctgagggaccaccggaagtactggtgcaggaagggtgggatcctcttctctcgctgctctggcaccatctatgcagaagaagaaggccaggagacaatgaagggcagggtgtccatccgtgacagccgccaggagctctcgctcattgtgaccctgtggaacctcaccctgcaagacgctggggagtactggtgtggggtcgaaaaacggggccccgatgagtctttactgatctctctgttcgtctttccaggtaacagatatctctccttccccaggctggggacaggagctgcagagggaagagggaggggtggtggggcataatcctggtaccaacattatgggcactgagtcctcagggagatcatgcaggtcaagcaccgagcaaggcttggggcacagaaggagccgcctgagtcttggccattgtctcactcttgctgcccgaggtcacaccagtagtagatgtcagagcaggaccggacccagatctgtccagggctgggctcggcgcctttcctttctgcccaggtgtgctggagggagatttccataggctgggtacaagatagacatatcaggggataaagaagactcctcgcctggtgtcagagatattcctgaggcctcccgaggctgggccaaccattgctgcattccagacccagcccacagcatcaccctggacatgctggcctcgccctgcttgtgccctcaactctcccctcctggcctccacctccccagatattgaagtccagccacaggtgctagagtgcctgggaaccagcctctgggtaggatgcctgaaggagggatcgttaaatgcagggacactagggggccggggctggagctatggggcctgggtaggggataaagcacctctctgggagcccagaaccccaagtggacctgctgagctaaggagaaagaagccagagagggcccaggggagtgggagccttggtctgctggccagtgtgggcgaggtacatctttgtatccccatttcacggatgagggactgaggctccaagagactaagtgatttgcccaagatctcacagcaggaagtgatggaactgggattcaaacacaagtcgtttccagctttgatgtctgctttattcctctcctagccccatagctgggacctatcccaatcccaggcccatccctaccaccatagcccctattttttttttattcctttatccatggatctttaatttgaggaaataaagttaaacttgccaaatagcagcagcatcgaaccacattgaatctgttcttcattatttacaagattctcttatctcttccaattcttatcagtgttcacatgtcatttctaccagttatgatcaagttcgcttgtgttttaggtttaccctcatttgtaattctttatttgtgtatgacatgtgtattgctatattatcgtcctatatcggactctattggcctctctctgatggcagttgggatgttgaaaatgaagaagactgacgacagtgatgtgctggtaaatgtttaacaggctggggatgctgtcattttgtggtgttttccaatttctgtggtgtccatttctgtggtccaattcccatggccaatttccagccatcgacagtttaacacgatctcaccaactcctgaaaagttaacagtgagctcttgtgagtcagtgcgagccatctccagcacaccattgagtatggtgaaccatgagaagaatttctaagaaagtcagaaaaagacaaatgtagccactatcatttcttttctttttatttatttatttttattcattcattcattcattcattcattcatttttctgagatggggtctcactctgtcatccagacgggagtgcagtgacacaatcttggctcattacaacctctgcctcccaggctcaagtaatcctcctacctcagcctccagagtagctgggaccacaggcacaagtcactatgcctggctacattttggttttttgttttttttttaagatgtggtttcgccatattggcctgtctggtctcaaacttctggactcaagccatctgcctgcctcagcctctcaaagtgctgagattactggcagaagccactgtgcccagccagcctactatcattttcttttattcatctttgcctgaaggccctaggcaatgaaatatgcaagattaagaagtataagtcccggcatggtggctcacgcctgtaatcccagcactttgggaggtcaaggcgggtggatcacgaggtcaggagttcaagaccagcctggccaaaatggtgaaaccccgtctctactaaaaatataaaaattagccgggcatagtggcaggtgcctgtaatcccagctactcaggaggctgaggcagagaattgcttcaacccgggaggcggaggttgcagtgagccaagatcgtgccactgcactccagcctggtcaacagagccagactcagtctcaaaaaaaaaaaaaaaaaaaaaaagaagaagaagtataaatgttggaaaggaaaagataaatactctgtatttgcaaaagatttgatcatctacttagaaaaatccaagaataaactgacctagtgttacagattgagtatccctaatccaaaaatgcaaaatactccaaagtccgaaactttttgtgtgccagcatcacacacacaaaggaaatgctcactggggcattttggatttcagattcctggattagggatgctgaatcggcagatataatgcaaatattctgaaatctgaaacacttctgttcccaagcatttttggataggggatactcaatctgtagaagagaaagtggtggagaaagagggagagtccaggatggcacacagtcagcaaggactggggaagtgacagatggacttggggaagtggggaccggagtagctcctggggagttggttgcatcaggcttctgcccactgtgctgggcacagaggacaggaattttttttttttttttttttttttttgagacggagtctcgctctgtcgcccaggctggagtgcagtggcgcgatctcggctaattttttgtatttttagtagagacagggtttcacgtgttagccaggatggtctcgatctcctgaccttgtgagctgcctgccttggcctcccaagaggataggcatcttgcctttaaggagtctcagcctagcagggagacccagtacacaagaaattgcagtgtaagtgagcattagcgccactggaggcacgcacaggggactgtgagtgcacagaggaaaaagagattcgctgcttccagggaagacattacagaggagttgaccttgagcttgtgctgaaggacagaaagaagtgctttaggcagagatggaaaggaaaggcatcgcacacagaggaacagcatgtccaaggcacggaggtgggcaggaggctggtttagtcgggaatagaggatgactctatggctggagcaccgaacagagaaagaggcgaagctgacaaggtggttcaaagcctcaaagcctgagttttgttctttgcttttttttttttttagagacgaagttttgctgttgttgcccaggctggagtgcagtggcgcaatcttggctcactgcaatcaccgcaacctctccctcccgggttcaagcaattctcctgcctcagcctcccaagtagctgggattacaggcatgctccaccatacccagctaattttgtatttttagtagagagggggtttcaccgtgttggccaggctggtctcgaactcctgacctcacgtgatccaccagccttggcctcccaaaatgctgagattacaagtgtgagccaccacacccggcctgaagcctgagtttaagaggcctcgaaaggcatactaaaaagtttgaactttggcttttaggcaatggagagccagtgactgttctaaggcagagagggatgggatccaacacagacttttgagacaaaactggagtagtgtgaagggtggcagggaagaagcaggctgagaggcaggtgggtttgaggctctgagctaggcgcgaggccagggggctgcaggagtagaagaccagggatctgctggaacccgccacgtggctcctggttggccgaggcgaaagatggcagtgctctgtgctgaggtggggggtaggaaaactgccagctgctcccaaggaaggaaaaggggttcagagcggtgccacccctgagagcagcctttccctttcctctaggaccctgctgtcctccctccccttctcccaccttccagcctctggctacaacacgcctgcagcccaaggcaaaagctcagcaaacccagcccccaggattgagtgagtgaatggcaattccgccccttcccttgccacccttcttacagaagcagccagtgagtgcctgcctggtaccagacacaatagtttatggccacctaggtgtccccacaagcctgggagctgggttgtccagctgtggaagtggaggctcagcagggttaggtcacttgctcagggtcacacaagaagtgccagatcccagaagtggtcacagcctgaccccaaagctcatattctgtctgcgccatccagagtctcgggggcaagccagaaaggccaggccttgggccctgacctctggactcatcctgccaccctgcccttcctggtctcatggctgcagaaggaagtcaaggccttactgaggcacgggtggttggggagggggcacatggtggtgaggggaggacctgcccttctggtgaggaaggaggtgacaattgactgggactgtagggggagggcaggaaggtgtccactgaatggtcactggaaagggtcatggaagcggggaaggggagtgcttatacctcctcacagaggcaacaagctgtgggcacagaaagagactgaacatcatgcacagctgtggggtgtgcctgatctacggtctccttcctcaaagtggcttcatctagatctgtttgcttactggggtatcctttagctggggatgttccgagaaacgggtcccagggaggctagggttcaggggtccagggtcagaagtcagggatgctgggatgcaagggtcaggaaggatgctgaggcattgcttttggacttgtagcttctcctgggctctacccggcagccaccacagccaagcaggggaagacaggggctgaggcccctccattgccagggacttcccagtacgggcacgaaaggacttctcagtacacaggaacctctcctcacccagcgacctctcctcctgcagggagctcccgcccccccatgcagctggactccacctcagcagaggacaccagtccagctctcagcagtggcagctctaagcccaggtgagccccaggtgaccaacatcccctttcaagccatcactaaaccataaggtgcctttgagaaaataggaactcaacactctttcctctaagcggacgcatcctcttgtcatggccacagcctgcagcacagagagtccctcacaggggcccttgagcagtggacagcttgtactataggagccagcagctctgctgcctgtccagtgtgaagggtccaccaggatcccagtcctgacctctctccctgccccagcctcagggacggccaccccagttctggggcttttgcctgtatactttgcactaagccctgtgccaaacatgaaaactcagagtccaaaagaaaacaattttttgccttacaactggagtcccagcctgaaggattggttcttgggggttgtaaatgcacttggctaccgacatccaggcagctgctggcaggttcaggccctgctgaaagtgaatcctgggttggcaatgggggcggggatccgttccacacctgacagggctgatgggacatcgtggtccctagtgccctctgatctccttgggagagagaaaggacatggcttgactcacagtaagaatgccaggatgccccacatgccagtgacaccagcccagatacaggccaccgggaacttccccacacaccactgcatgacctaacgagtcgctcattgcttcaggtgtcagtttctccagtgtgaaattgatccactcctacctagttatacaggggttgtggaatttaacagctaacattgacgtggtgcctggcatgtgtgtggcactgaactatgcgctttacacatcctcacccatttgatcctcaccacagccattttacagaggaggaaattgacaccctgggaggtttagtcacttatccaaggtatagaaaggtggtggagctagagtttgaacctagacagcctggctccggggtctgcgctaattacataatgtttgtcaagagccagtagcactaaataccacccccccgcaccaccaccccccacaagtctctgctgcattgaattggattccacactagggattggctttctcagcctgtgcctgggacccccaaaggacatagactctggcttatctggtaacagccactaggctccttgcgtctcgtctccagggtgtccatcccgatggtccgcatactggccccagtcctggtgctgctgagccttctgtcagccgcaggcctgatcgccttctgcagccacctgctcctgtggagaaaggaaggtgagcaaaggtgggcggcaggaaggcgggaggctcactgggccagggacctcactgagacctgcagctccccatccagccctggaaagaccctgtgggtctcagcgtgtctgtctgagatatgagcatcaggagctgtggcctcccttctgaaggagccacgaggtagtcaacattaggaaagtaattcacaaggggaaatgggagaatgaagggttctcagcttcttcctgcctgtctaaactgatcaagcacttctctacctattgatcccagggaattcattgccagctccttgtgtgggaaccaactgccaggggcagtgcaggaccaagcacttgaatttgagcaggacagacattgtaaccccactcctgccactgggtctctagagctgctcagccccttccataggctggggctcaaatcccagctctgccactttttagctgtgtgacgtcaggcaagtcacctaactgccctaagcctcatttacctcaaatcacagatatacatcaaacagaaatagaatacaagccacaaatgtaatttaaaacttttgaatagccacatgaaaaaaagtaaaaagaaatgagtgcacttaagtgtattttattttattttaattacttattttttagacatagggtctaactctgttgcccaggctggagtgcagtggtgtgatcatggctcactgcagccttgaactccatggctcaagcgatcctcctgcctcagcctcccgagtaactaggactacaggcatgagccactacgcccaatctagtgaagttaattttaataatgtactttatttaacccaatatatcccaaacattatcattttgatatggaatcaatatgaaaatatcaatgatacatattctacttccatgtttttcatactgagccatcaaaacccagtctaacatgaagtagtcacatttcagtgcctgatggccatgtgcagctcccggctcccgtgctggatggcaaagactaaaaggattaaccaaaatctcagtaataagagctaccatgtgccagccactatccccagcttatcttgcttatcccctttaatctccacactgtggagtacacccattttccagggggagaaactgaggcacagagtggttaagcagcttgccctttgtttgcatagctaagaagtggtggagccgggaagataatcacaatgtcatacccatggaggcggccacaggggaatcctgggcctgctttctgtcccttccatgtgtggctcctaggaggaaatgtgggctttgtccaggtcccctctgaagaagccagggtgggagcattcctggtcacaacctcagagccacttagcaccttgcatctcaaactttgattgccagctagcagcggtggcaacccttggtagcctgttagaaatgcagaccctcagaccctcaccccagcctactgaattagactctgcactgtacaaaaacatccagggggtcctatgtgcacactaaggcttaagtagcagtgaccttagcacacagatttattttcccagccagtttctgaccctcatgagataatctccatgcactgatctcagaagactgggtcattcccaaggggctaagctggaaggggctcctctgcccatctggctgcctcctccctctgggaagcccctgctcccgtgtgcaagggggccagtccacctttctgggagcagctacaggccactcccggctactcctggcttcaaggggctcctccttctacatctctttcagctcaacaggccacggagacacagaggaacgagaagttctgcctctcacgcttggtaaggacagaggcatatggaagcccaagctcagatccccttggggctggaagtcaagattcctgggctttgcctctgtgacttcctacctggtcctccttgcctgacctagaggcagcgcttgctccccaccttggaggaatgtgtgtgagccccaagatcagcccttcagggtgtgagccggacacagtgcccatgggggactcacaggtgggaacctgatttcccgccaggtgccaggcagggtgggctccaggagccatgtgagcatcttctccaggcgccttctttccatccccccttttagaatcacagaacatcagagctggatccagatgaagcctttgagatctctagcctgacttttctctcagtttgaagcaaatcgcctttcagaacgcccaggggtcagggagctgttagagatgcactctccagggccccagacccagctgaaccctccaggggtggggtccagggactctggcagtgctacaaactctagtgtgcttttacaaaagatgagactgaggcccagagagggtaaaggtcttgcccatggtcacacagcaggtggtggcccaaacagagaacaggacccagatttcttgactcctgctcttctctttccagaactccctgatgttttctctgagcctgccttggctctgagaccaaggtggtgtggctgctctgggacccaggctgagggtggtgctctggggaccaggggcaagagaataagggtccctgtgcccattgtctggagctgggaacctgccccaaggctactgctgcaagaagagactgtgccctccgaggccagcactccaacggagggggctgcagcatcgcacttcaggcaacagaagcccctcctggcccctcctccctctgctgtttactgagatgcctccactccattcctttaaacacaagggcaggaaagcggagctaccattgccttctttcctggcgccagtgaggacaaaagactcaggcctggtcaccccaaggagggtctggggtggaaatgggactttgggctgtggcttaggaagcagctgttgttgtctcaggaagctcaacagggccaaaggtagcagaggagagtaagggaaaagtcatggagacacacggatggatggacggtgggtgccactggccacctccaagcccggcctcctggctctgcgggctagggcctgggtctcaccccacctagctccagaagaggggctggggtccaaggaggctgagagcgccggaaccagccacagctcccatgctactgccttctggcaaccctgagaagggctgctttgggctttttcctgcctgaggctcctgaccctggctctgctgaagagggaggggacaggaaggggcacagggccagcaggcagaggggctctagggggcggccccttgttgagggaaagatggaacagggcctcccaagagggtcagaggcaagaaccctgtaaacacgatcaggtgggtgcttctgctttttcttgattatttcccttgtggcttctccataggatttagcagagtctggagatggaattgaaggggtttggggctttctttgtccacattcgggtcaaagagggagggggatgcattacttatactttgagaggcctcacaggggtgtgaaaaccctgagggaagtcttaggggtcagaccagcattttctttccctaagagatcttgctagaaggactgccatccatccattcgtctgcctcatcttttattgaacacctactacgtgtcaggggctttatatatgccaacgaatcctcatcattcccatacgaggtagagtttagtatccccttcattttgcagatgaagaaatacaggctcagagagaaaagggaaattgcccagtgacccagcctgaaagaggcagaactggggaggctgacaggtctatggggctggctgcagagccctctgcgtcctccaccccgctgcactgaagtacaaggggtttgaggaatggagccaagttcgcagcccaagactcctcccccagactcaggagaaagaccctgggacagctgcagaccctcactcctggaaatgaatagcctgctaagctccgatcagaactcagccctggcttcccaagacttccctctttctttattaggtttattactagtacctagaagcagagctctgatatatatcttgcatatttagcaacccagaaaatgcctccatgcttgctggaacagggccgatcgtccacagtggaggcagaggggcaggggagaggttgcaaatcacaccagacttgcgatagtgggcctggctgctgcctaggtgtgccgtttggcctctgcactgcgaggctctttcctcaaactcagtcaccctggaacaggtgacacttctgcagctgctggtggtccagggtcagcagtggctgggttaaaaccagattgcaaagctgtaaatatggactcatgggtctgatgtcaggagtcctctggtgtagccccaggtctgccctgcaccaaggccccctctgtcctcaccatgggcagggctaggagggacaagggccctaagtggcagcatttgggaattgccttacccctcccagtgccctcatccaccacccacacttcccccaaggaattctgctctaattcctaccttgtccccagaaggctgaagatgtcatccctgtgtttcttttctttggtatatattttatctttttaatttaaggttttagagaaatggggtctcactatgttgcccaggttggtctcaaattgctgggctcaagtggtcctctagcctcagcctcccaaagtgttgggattacaggcaagagccaccacacccaggcttcatcttagcatttctaacaagatttggctcaaacatctgcctctgcccccatccacagcagctaggtattgagagaagctgggccccggttagtagaccatggacaccgagcccaagaggaatgtgtcacacaccctgcccggatggcagcagggtatagggaaagagcttgggtctgcagtcagacagtctccagtatgagtcccagctcagccatgtgccagctgtgtgatgtcaagcaggttgcatcacctctctgagcccctgttgccatagctcacatagttgtaaataggaaagagtgagatgatataccctatacatgcccagaaaatgggagcttctttctctggcatcagtgcccatttggccatgggattcactgtccaggaaaccccagggcagcctgtggccttgggagtcttggctggggagcttggccggctccagcctctgctccgcccacctgctagggcaaggcctgagatggacgggcctggcgttcctgatctgaggacccatgggagcagccaggcccgggtcagaatatgggcttccccactgaccctggactacctgctgtcttccctgggccgtggtctcctcatctgatggataatggattgctcagacccatcatctcaagaatgtttcatgtgtcccttgttattcgacgaatctttggcgtgtccaactttgctgtctcttggcctgttacaaagaacctgcagcctgcatgatctttctgctttaaaggatagaaaataatgaaaacaaataagtcattccagaatttctcattggttgagtggtaggatgctattatgaatattataatcccaaaggacaaattcttacctagttttacagctgaggaaactgagcttcagagaggtgagacagcttgtccttccttggacaagacaggaaggaaggaagtggcagaggcatccaggagcttagtattctcccctcccggcacctccctgccttgcccacccctcccacgtttccctcatcttgcttgggcttggctgggctagcagaccatccctgctgccaagaacaggctgttctgaccaagtctctgttacagccactggggaatggccgggacccagaggacgctgtgatcaaccttgcagggcccatggggtctctcaccatccccgagccctctcccagcctctacacagagatccagtatctaagccaagtatggacagaagggccctgggaagggaggggctgaggagccaccttgcctgcctccactctgacaattagaggaagtggaaggaggccttttcctcagcatctgctccccaaaccccacacccccgcatctacccaccttccccattcacagccataggcctagcccatttcacctgggaagccagagcttttgacctcacatcctctttttttccggtccagaaaattcctgaatagcttgttgggagtcacagctgacagtgctgtgggctgcactgccctcaaggccacaactgcgccagaacccagcctggggccttgagggcaccccgggggagggatggattggggtcatgagaggccatgaatcaaagcctgggagttctggggagttgttaggtcctgtgcctctgcagatggacggagggctggaacttgtggaaaaggctgggtggacgcagcagctacctggggaccacccctcacacctcccaccccttcatctgggttctgctctccaaaccccactgttgtctttacagactgcggaggaaaaggaagccccttcccaggcccctgagggggacgtgatctcgatgcctcccctccacacatctgaggaggagctgggcttctcgaagtttgtctcagcgtagggcaggaggccctcctggccaggccagcagtgaagcagtatggctggctggatcagcaccgattcccgaaagctttccacctcagcctcagagtccagctgcccggactccagggctctccccaccctccccaggctctcctcttgcatgttccagcctgacctagaagcgtttgtcagccctggagcccagagcggtggccttgctcttccggctggagactgggacatccctgataggttcacatccctgggcagagtaccaggctgctgaccctcagcagggccagacaaggctcagtggatctggtctgagtttcaatctgccaggaactcctgggcctcatgcccagtgtcggaccctgccttcctcccactccagaccccaccttgtcttccctccctggcgtcctcagacttagtcccacggtctcctgcatcagctggtgatgaagaggagcatgctggggtgagactgggattctggcttctctttgaaccacctgcatcccagcccttcaggaagcctgtgaaaaacgtgattcctgggccccaccaagacccaccaaaaccatctctggggcttggtgcaggactctgaatttctaacaatgcccagtgactgtcgcacttgagtttgagggccagtgggcctgatgaacgctcagacccctccagcttagagtctgcatttgggctgtgacgtctcccacctgccccaataagatctgctctgtctgcgacaccaagatccagctggggactcccctgaggcctgcctaagtccaggccttggtcaggtcaggtgcacattgcagggataagcccaggaccggcagagagtggttgcctttccatttgccctccctggccatgccttcttgcctttggaaaaatgatgaagaaaaccttggctccttccttgtctggaaagggttacttgcctatgggttctggtggctagagagaaaagtagaaaaccagagtgcacgtaggtgtctaacacagaggagagtaggaacagggcggatacctgaaggtgactccgagtccagccccctggagaaggggtcgggggtgggggtaaagtagcacaactactattttttttctttttccattattattgttttttaagacagaatctcgtgctgctgcccaggctggagtgcagtggcacgatctgcaaactccgcctcctgggttcaagtgattcttctgcctcagcctcccgagtagctgggattacaggcacgcaccaccacacctggctaatttttgtacttttagtagagatggggtttcaccatgttggccaggctggtcttgaactcctgacctcaaatgagcctcctgcttcagtctcccaaattgccgggattacaggcatgagccactgtgtctggccctatttcctttaaaaagtgaaattaagagttgttcagtatgcaaaacttggaaagatggaggagaaaaagaaaaggaagaaaaaaatgtcacccatagtctcaccagagactatcattatttcgttttgttgtacttccttccactcttttcttcttcacataatttgccggtgttctttttacagagcaattatcttgtatatacaactttgtatcctgccttttccaccttatcgttccatcactttattccagcacttctctgtgttttacagacctttttataaataaaatgttcatcagctgcatattccatcctatcagtgtgtctcaatttatttaaccaatagtctatcactcgatatttaatttgcttccatttttgctattgtagataagtgtgggtgaaatttgcctgggggtttatctgcattgggagatttcttttcctttttcttttttttttttcttggagacagagtcttgctctgtcgcccaggttggagttgagtgatgcaatctcagctcactgcaacctccacctccctgactcaagccattctcctgcctcaacctcccaagtagctgggactgcaggcatctgccgccacgctccgctaattttcgaatttttagtagagacgggatttcaccatgttggccaggtcttgaactcctgacctcaagtgatccgcctgcctcagcctcccaaagtgctgggattacaggcatgagccactgcacctggccgggagatttcttaaagaaggatttgcgtgcatggaagtgccaggtcatagggagtgaacatttttgaagttactgatgcctcttgctaaacagctttctggagtggcagcaccaatttcacccccaccagacccttgcaatcagtgtttcttgaagtcctctgcacctgtccctgctggaaaggcaggagaaacagttcaataatggccctgtgatcagaacctcgagggcctgggggactgggtggaggtggaactggtctgatgaagctagagcagctcaccagaaggtgccagcctgtgcccgaggcctctgggttggggttgcaccaagtaccttctctgggtggacagtgagctcccaggcccgaactctgtgtgctgcacccaggctccaggcactgtgtgtgccaaggtgtttgggacatagggagcagcaagtttcacatggtcccaaatcttctgctgggacctgggcacacacactgtcagaatgcaccctagaagtgcatcaaaagcaggcttcccccctgaaaaatcccttggctggggtttccctggaaggaaagaaccctcctgtcctctgaatctctcctcacctactggagccggggcttcctgggaaccaggaggtggtcagcttggccatcccactcccatccctcacccatttgcagactgggctgaataaattgacatattctgagaggcagagctctctcccaggcaacctaggattggcatccatggaattccaagtttcagtggatttatgagacacataaatattactcagagacactctcttattcccacagtaccaccaagagggcccagctccctcctgacaggtaggggagaaagaccactcccttaccagttgacactttgcaatcccccattttgatacaccttggtttgatgtttgtacttgaatactcagatctgcagtctttggtatttacgtgagattttattcaatccccttaaacaaaaagaagcaacaagtcactgctcacctatcctgagaatgagggacttttgctgggaggtaaaacttcagaaaaaattggaggaacatcaaagaattgcaaacatttagttttgccaaattaggacagtaaatataacaaaaataacaaactgtcacttaccagtccagctatttctttaaaagaaacttttttttttttttttgagatggagtttttgctctgtcgcccaggctggggtacaatggcacaatcttgctcactgcaacctccacctcccaggttcaagcgattctcctgcctcctaagtagctggaactacaggtgtgcaccaccacacctggctaatttttatatttttagtagagacgaggtttcaccatgttgaccaggctggtctcaaactcttgacgtcaggtgatccaccccctacggtctcccagagtgctgggattacaggtgtgagccaccacgcgggcagccaaaaagaaacattttaacaccaaaatggattatttaaggcctctcttccccaccttactcttgacaaagaattggagattatgattctaatccattgaggtctattaaggagaaatttgtaaattcatccaggaagtgggtaagggaggggcatatagggggaaagaaaacagacacagagaaggtggaaagcgcctaagacatgcaaggggctgtgatgtgctttgggggagtcttcccaggagcagggaagagctccccgccagtatcacttcaaggtgtggcaagcaagcacctgggtctgacagctgggacggcaccatggggctggatgtgagtgccaaggccctgagtctgatgcaaagcagcagatctacccatctgcaatcacacatgggctgggacagaagagacaaaaccagtggccctttccttactgtctttcttgcctttttttggattgactaagttctatttttgttttcttatgccattctttttccttctacagtatggaggttatatcctctattttgaatcttgaactttgtattatacataggttttcaacaaagactacagttaatatcctcacaatccttaatttttccttgaataatataggatccccaaaccctttaactcccatcacttgctcctatcttgcagaccattttcttccagtttttaattctgtcctttccctctctttttttttttttccaacaaactggacatcattgttaattactatttttaacagctttattaaggtataactggggacgggcacattgggtcacgcctgtaatcccagcactttgggaggccgaggctggcagatcacctgaggtcaggagttcgagaccagcctggccaatatggtgaaaccccgtctccactaaaaatacaaaattagccgggcgtggtggctcatacctgtaatcccagctactcaggaggctgaggcaggagaattgcttgaaaccgggaggtggatgttgcagtgagccaagctcgcaccattgcactccagcctgggcaacaagagtaaaactctgtctcaaaaaaaaaaaaaaaaagtatagttcgcattcaataaattgcacgtgtttagagtatactattggataagttttgtattatgtatatacctgtgaaacagtcaccacaatcaagataatgaatatatccattacccccaaaagttttcttctgcccctttgtaatcctgcctcactcccatcctcattcaccagtcgatgggtatttgggttctttccagtctggggctattacaaattgagctgctatgaagatttatgtacaagtctttgcatgctatcacttctcttgggtaaataccttggagtggaacatctgggccatatggtaggtatatgctcatgttttccaaagtggtcataacattttgcattcccaccagccatgtagaattccagttcctccactgacactcactactatcagcctttttcattttaaccattctaataaatgtataaactgcaccaagattgtagctttaatttatacctccctgataactaatgactttgagcatctttttgtgtgctaatttgccatccatttatcttctttggtgaaatttctgttcaaatatttcatctatttttattgagtttagagagctcttcatatattctagaaataaatccttcatcaaatatgtgatttacagttatcttctcccaatgcgtgacttgtcttttcattctcttaaaaaggtcttcttagcttgctgcactgaaaaagggaaaaaaagaagtctttcacagagcagaagtttgacattttgatgaagttcagtgtgtcaattttttcttttatggatcatgctttttgatgttgtatttaaaaaatctttgcctaatccagggtcacaaggattttctcctatgttttctcctataagtgttgtagttttaggctttacatttagacttatgaatgaacttgagttaattttcatatacgtgtgagtaaaacaacttcttcttcttcttcttcttcttcttcttcttcttcttcttcttcttcttcttcttcttcttctccttctccttcttcttctctcctcctcctcctttcttccttcatcttcttcctttttttgggtatggatatatccaactattccagcaccatttgttgaaaagtctaccttgtccttcctctactgaattgacattgcactactttgaaatcagttaaacatatttgtgtgagtctgtttctggccttttctgttctattgacctatttatctatctttatgccaataccacactgtcttgattgctgtagctttataatatgtctcaaaatcaagtagtataaatcctccaactttgttctttatcaaagttgtttttgctcttttagatttctagtatttccgtgtggattttagcatcagcttatcaatttataccaaaaaaacttgctaggattttgattgggattacattgattacatagatcagtttggggagaactgacctctgaacaacattgattccaacccatgaataactctatttatttaggtctttatcttaatttgggctgctataacaaagtgccatagtgttggtggcttctcaacaacagaaatcgatttctcacagttctataggctagaggtccaagatcagggtgccagcatgatcaggttttggtgaaagccctcttttgatgtagtgaattcttataattttattttgccttggcatccattttacatataagctggactttctcatatcagaagcagggcttagtcacccttccagccacagtttccagttctctgccctctcgcagttcctcaatatggtcgatcccagttcctgcttcatacaaccacttcctggtgaccacctctctatgagacagctagatgcgacctacctgacttgccctactgaccctcttacacagggactgtgcaaatatgccacagtgactacctcgcagtcacagcatgactccatggaactcatgcctgcttgctctaaacccgtcaattagaactctctacgggaaacttgcttgggtaaacccctggactccaataaaggctttggcccaaggtctgtcaccatctctctcctgctctcactcactggttgagctccttgccacctccagacttcccattggcaaccagtagacgcccctaatgtctctgggacctgtaagtaataaatttcttctgtttcatgcatttgggtttcactctctcatcgtgtctcacctgacctacacactgtaacttaactttcccctgattggggctctcctagaaaattgctatgtcagaccgggcgcagtagctcacacttgtaatgccagcactttgggaggctgagtccagtggatcacttgaggccaggggtttgagactagcctggccaatatggtgaaaccctgtctccactaaaaatataaaattagccgggcatggtggtacatgcctgtaatcccagctactcaggaggctgaggcaggagaatcacttgaacccaagaggtggaggctgcagtgagtcgagatcgcgccactgcactctagcctgggtgacagagcaagacccagtctcaaaaaaaaaaaaaaaaaagataaagaaagaaaattgctgtctcagcttatggccactgtcaagagagaccttaagaccagattaaaagaaaccatgggccaggcatgatggctgatgcctgtaatcccagagctttgggaggccaaggcgggagaactgtttgagctcaggagtttgaaactagcctgggaagcaaagaagaccccatctctgcaaaaaataaaaaaattagccaggcacggtggcatgtacctgtagtcccaactactcaagtggctgagccaggaggtttgcttgagccagggaggttgaggctgcagtgagccatgattgcaccactgcactccagcctgggtgacagagcaaagactctatctcaaaaaaaaaaaaaaaaaacaactatcttcctcttcaatgacacctatggagtccactcattaaagataaagtgttggctgggcacggtggctcacgcttgcaatctcagcactttgagtactttgggaggctgaggcgggcagatcacgaggtcaggagtttgagaccagcctggccggcatagtgaaaccccatctctactaaaaatacaaaaaattagtcaggcatggtggtgcacgcctatagtcccagctactagggaggctgaggcagcagaattgcttgaacccggcaggtggaggttgcagtgagctaagattgtgccactgcactccagcctgggcaacagagcgagactccatctcaaaaaaaaaaaaaaaaaaaaagaagatgaagtcgtaagatggaaagaggctagatccctgaatcaatgctagtagcaccactcaacatacatgagatgtcatgtgaacaagaaatgagtaacaaagttattaagttgctgagatgtggtggttgttacaagggttggcccctcctgaccttctgatctaattgatctggagaagggcctaggcaattgtttttttaaccccccaggtgatcctaacgggcagccagaattgagaaccactggattgggacagaaatacaagtgcagagttgcttagtagagaaatactgagtttccaggaatgccccaggaaatgggaagaaagttgtccagaaatgagaggaaaaaaagagaggacagagaggacccagcaacatggtggaggcaagggaccaaaagagaagttgaccagaaagacattctttgtgctaggaatggtcagaggctctttggaatagaggtgtttaataatcaatgccaaattcccatcagaactatgaggtgatatgaacccccatggatgctttggggaaatcaaaataagggtggttgctcatctggccattgcagggagaagggaaccgccaaagctcctgagaatcctcagtgatcccgaaggagtggcacgcagctccgctgaataactcatttaggaagaaagctgatcccttaaccctgaaggatttgccaaacatcgcccttgggtgctcttttgatgtcacctatggcccctgtttctgagtacctggaagcaatcctagtgttaccactgggagggtccatgacacttttacagaagataaatctgaagcccagagaggtagagggacctgttgggggccacacaagttccaggtggagctgagtgaattagccacagcatgtctgagtcctcgagccccatgaatgctcgcagacacctgggtgcaggcattttttttttaattttagatttttagggggtacacatgcaggtttgttacataggcatattgtgtgatgctgaggtttgggtttctattgaacctgtcacccaaatagtgtacagagaacccaatatgtcatcaatatgtagtttatcttttcttttcttttcttttgagatggagtcttgctctgtcccccaggctggagtgtaatggcacgatcttggctcactgcaatctccacctcccgggttcaagtgattgtcctgcctcagcctcccaagtagctgggattacaggtgcatgccaccacacctggctaatttttgtatttttagtagagacggggtttcaccatgttggccaggctggtcttgaactcctgacctcaggtgatctgcccgcctcggcctcacaaagtgctgggattataggcatgagccactgtgcccggccaatatgtcatttttcaacccttatctccctccttccttccctccctccctcctcttatcatcctcagtgtctattgttgccatctttatgtccatgtgtacccaatgtttggctcccgcttataagtgagtacatatggtattcaattttctgtttctatgttaatttgcttaagataatggcctccagctgtattcatgttactgcaaaggacatgttttttttttttgttttgtttttttgagacagagtctcactctgtcgcccaggctggagtgcagtggcgtgatcttggctcactgtaacctctgcctcccaggttgcaatacaagcaattctcctgcctcagcctcctgagtagctgggactacaggcacgcaccaccatgcctggctaatttttgtatttttgctagacacagggtttcactatgttggccagcctggtctccaactcctgacctcaggtgatccacccgcctttgcctcccaaagtgctgggagtacaggagcaatttcactatttttatggctgcattatatcccatggtgtatatgtaccatattttctttatccaacccaccactgatggacacctaagttgattccatgtctttgctatggtgaatagtgctacgataagcatacaagtgtgttggaggccaaaagaatgagggtcgtgatcaacccagtataccactggaggctatatgagcaaacagcaaactgttctcataatgcagaatgttggcaaactgacaaactgcgtctgccacccagaaggaatgctgagggcagtcacgccccaggcgcagtgtttgtgattatctacaggcacacctgaagcctgttagcaattatgtgaacctgtgataaatcaagcagctgaccaatggttacctgctcttccctactctttctacccaataaatatggagggctgtggaagcttagggcccttgctcactagaagcaagaagcccccaaccccttctttaaaacagattcttttgtcttaagttttcatttctgcgttcatcctcttttgttcagtcccatagtaactgtcacaagtggtgcccaaacagggatgaacagggatagggacagacagggacagatagagacaagcagggacttgcagggactcgtagagactagcagagacagacagggacagacagggacacgaacgaggagggtccgctggagcagagaaagtgaaactggccagacgaacgagaaaccccagaacgagtctgctggcagtggatataaggtcagtgccctaaaaaagtactgggatataaggtcaggtccctaaagaggtactgggagcgggaagtttctgaatcagggtaacatggggcagaatttgtccattctttctgttttttctgtttggggtttggtctgtactgtccttttgtcattatttcaaaatttgaaagaattttttgccccacccacagcacctatcaagggcggtgaataggagagggagggtgaagattggcctgtaccgtcttcttttgtggctgcagaaatactaactttaactttggctttgagaatgcaaacgtggattgtaagcatgcactggcacctgtgagatgtacaagaagcttaggaaattttctcagagcttgtcaagatgtgggaattgagcttcatcgctctacaatgttggctcaagcaatggctagtttagtagttgataaacctaaaaggagccaagggtcaaaccctaaagtgggaaagtgttataattgtggaaaaattggacatttcaaaaaagaatgccgtcagatctctggaaagaagggatcttataatacagttccctcccgcacaatagaaaaaaacaccaggactttgccctcctttgcaataaaggaaatgattgggctaatcaatgccattcaaaatttcatcaaaacagcacccccctgtggggaaatgagaagggggcctggatgtgggcacctcaaacaatgagggcatccccagtccagcccacaactccgtttcaagggtgggtttccggaggcacattgattccctctccccaggaacacctggaagcacaggattgggtctcccagtcaaagaatgtgttactttagttggaggagacaaatccacgaagattcccactgggatttgtggacctttgccaacaggatacatgggattaattttaggcaaaagctgtcttaacttacagggcattactgtagtcccaggagttgttaatttggattatgaaggagaaattcaagtagtggtaatgttacaagatctttgggttttgaactgggagaatatattgctcaactgttgcttatctcctgcaaattacacccttctccacgaaagaagaaacaagggaatcaaggatttggaagtacaactcggagggacatttatctatcacaaccaatagcatctagtagacccacttgtgcagtgcaaattaaaagttttgtgggcttatggatacgggagcaagagactggcctctggcagtaatggatcttggagattttttttttttactatacctttacacgagaaggataagcctcgatttgttttctgtgccttctgttgattggagaaagcctgtttctcattatcaatggaaagttttaccccaaggcatgctcagcagtcctacgtcatgtcagcattttgtaggaaaagcattaaggaacctcagaatatgtttcccactgcctatagatttactaacgtggggacgagggtatgcttatgtttttataggagatggacaaaccatgtgggtgccctcaaggtgtgtgcaaccatggaacaggagactggagggacccatggatcccaaccatgggcctggttcccctggtatgagccatgagccagttgaatctgagtgcaaagacagagtgaggactgaccagagtcacactgacatcaacccccataacatgaggacagattttgttcaattaatgtaaaaacaaaaagggggagatgttggaggccgaaagaatgagggtcatgatcaactcagtataccactggaggctgtatgagcaaactgttctcataatgcagaatgctggcaaactgacaaactgcgtctgccacccagaaggaatgctgagggcagtcacacctcaggcgcagtgtttgtgattatctacaggcacacatgaagcctgtcagcaattatgtgaacctgtgataaatcaagcagctgaccaaaggttacctgctcctccctgctctttctacccaataaatatggagggctgtggaagctcagggcccttgctcactagaagcaaaagcaaggaccccttctttaaagcagattcttttgtcttgttttcatttctgcatttgtcctcttttgttcggtcctgtagtaactgtcacaagtggcgtacatcctccttcattcagtcccatagtgacagtcacacaagtgcaggtatctttttggtggaacgatttcttctcctttgggtagatgcccagtgatgggattgctggaatgaatggtagttctatgagaactccccaaacagctttccacgggggctgaactaatgtacgttcccaccaatagtgtataagcactccctcttgtctgcaacttcaccagcatctcttattttttgaccttttaatagccattctgactggtgtgagatggtaactcatggtagttttggtttgcatttctctgatgattagtgacgtaaagcactttttcatacattgtcacttgtatgtcttcttttgagaaatgtctgttcatgtccttgggtacaagcacttagaaggagcatcttctggggatgggggagtgtgcaggggcaagacagaggaaaggaagacatcgcagaaaacaagacatgttgctctgacttccattctagtagtcatctgtgctgtgctccccagctctcactctctcccaaagccatccatccaaccccaaccaaagaaaagcagagccagaagcctttgctttcacatttaatccaaggaaaaagaaagaaaaccaatcagtgagaaaactcaagaattggatggctgagggagggaacagaggaagcgcactggggctgggactgaatatggacagtggatggtagggtcctcactctcttgaggtccctcaaatacaagagtccacaatggcagggagggagaacagagtcatagagctgtggtgggggcacacacctgttccaacccagccccagccctgttccaggtgagccaaggactgacagcctctgctaggtacctgggagggctgtggagtgagggctcaggcaggggaggtaggaggctgctcagagaggaaagaccgagaagagacaggagggaagggccccaggcctgccccttgagcatccctagcagtgaaggtgccatgaaggccaggtacccaacccatctccatcagagatgatggtcatttggatcaagggggcagaagcagctgcaacaacagatcttcccctgcctctaccctcaaatcccccagagaaggtaggaaatggcaagtgaccctatagcctcaggtcagcaagaaaacaccccatttccttcccactcccttaggctgagggtgatgcaaggcagagctgaatcaggatgaaaggacactgactaagggaaaagaggagcaggagaatgagtgtgtagtatacgcagagccacaccaacgagatgggggcaggcctggcctttccaccccatgtgtatagtctatgcaaatgcaaatgagattcctagtataagaaatatattctaacatttgtaataaatattctgtttattctccttccccttccctaggaaatgggcacacagtggttcaggggccagctttggctgacgctgcagcgaagactagttagacacttggaagaactgggaggcacaagggtttggactcagggtgtcacaggttgtcccctctgaggacaggctccccccggaaggaatgcagagaataatgaaggatgagatgcccaagtacatctaggacagcattctttcttaaagggagtctcctattttacaaaactgccctccccaagttatggcaggggggcatttagggtagggggacaataagacaagggaggagacatcaggaaaggaccagggctttggagtctgggatcagggtattataagaaatgagggctgatggggaacccccagaaaggggccccaaagagtgacctccaaaacaaaaccctttgcttcctccccaaattaaacctgacacacacacacacacacgcacgtgcacacgcacacacatacacacaacctggtgccagaggcacagacaggtgccgaacatgcacgtggaaccacaggttgtacagactacagtgtaaatggcgcctctggagttgtgtgtgaggaacctcctggagggcaactgtccttcaagcccaggctcccaaggtcccctctgcactcctccttagcccctccaacccagcagccctgatgcaagtgggctacctggacctggctagacagaaaaccaaatggaccaaggtcaaggacatagagctcagacctgtgcctgctgtgggccatggagagcttggggctcttcagttggtaacagcaggttgtcacagggctcagccctccatcctgcccctacctgggctgagcccactggcccctgccagcctggccctgtggggagcagggctgacctgtcaggacacattggagaaatctggagaaacttcggcagtgagaagctgtggatgagggaaggaccgagcagcatctgccctgcgaccctgtccctttccaaaggagctgggagctgcagtgctctgcagctgtggccactagctctcactctgactcctccagccttcaagatggcaccaggctggcaccaccacccgggcctgcctggctgccagcgggccacacattcccctggtcacacggaaacagcccaaggcctgttcctccgacacaggggtgagaggtgggaggagtccaggaatggggtgggtgtggccagtccagaggagaactggtgactggggaggggtggcagggggcagtgtgcctactgaccatgtggtcccaaagcagcttttctcttctctgtactgaccattatggaggtgactctgacacattcctgggcatagcttggccctcagagatatctggtgaccaatgggcatcaggagtgggcagcacctgggcacaaggtaccccatgaatgcccacctccctggcagtgcacgcctctgtgctgaagccagacttagggcctgctgggagctgttacccaaggacagccagatatgggggctaaggattgtggcagggggtcacaggtcaggagggggatggattcaggttctgggtttcaacacagagtgagccaaagaccaggtgaacaggctcagtacacccagctgacaggcacccactggggctctgtccgtagcttctccatggctgtctggagctcgcggaaggtcctctccaggttgctattgaccaggcagaggtcaaagtagtgcccgtagccccgctggatgcggctgctctcctccactgtccgtctcaggtccgcctcctgcccaggcacaaggggacctccctacagtcagtgcccacaactcacccccactgtcagaaggagctacagctgcccccactccccctccccaaagcccaaccctggtgtggactccctggctagggaggcaggggcccctctctgcgtgcctcaaagtggctcaccatcaaccacagatggtgagtgaaagggaggaaataagctttaataactgccaatcacacccctaaatgctttgcatgccacataatcttcactacagctctgcaagataggattaattctttcccatttatagcagagaaaatgaaggtataaaaaggtcacatagccagtcagtggctaaacagggtctgcctgactctcaagccagtgctccctcaagtctgactaggctgccttacctatgcagctagacaggctggtaccagggcaatccacaagtacccagggcaaccccaccctcgacccagtggaagctggatgggcaggggtgaggaagggtacttgacaactgacttaaataagctgaagctagctgcatcccaacagctccagttggccacacctgttgccaaggaggaggtgcccagaatggggatcaggcaaaggtccagagctccttaagggggtcattggcagaagggtgccagcctagacagcctctcctgggccccaggcacgctctgacctggggccggaatgctgcagcaccaggcatggccagcagagggacccctgcgctcagagcgccgcaaaccctccacctcctgggaaggcgcagcaagacataggaaggaggatggggctggagttctgcaatgaggccttgaagcctctcctccaggcgctgcctgctccctgacgctgactcagccctccagccagccttcccgcctctggctttctcctacccttcagctttcccccagctgtaagcaacccaagctcacctggcccacctccagcccacctctcccagttgccctcgggaactctctctggccagcactctgtctctgcagagtgggctgagccgggggccttgagtcagaagcacatgtatcccaggctaggtgtgtgcctggctcactctgagactttggacttcctctctcagacctccccttccacatctatgcaggggggaccacgtcctgcctcactgataactggagcaggcccctgtccctccccaacaccacctccttctctctgtcagctcaggcctgtcccccaccaccctaggcagctatcagacccctcccccacacctcagagccctcaccgtgagctgcttggtggatattccactctccagcgcagccctgttcatggcccgcagggtctcgaagtctggggcctcgatgaacaccacgtaagggacaaactcggccgttcgtagcaccttcaccgcctgcagaaggagaaggcaaggtagggagtatatccccatgtctgtcctaggaaccagagaaaggctgtgagggtaactggggttggggtgagcacttgggagtggatgagaaaagggtgcccgggggtctgggacatgagtcctgggacaaatgacaaacagctggcaggtggctggggtgactggaggagactagaggaggagtggggactctggaaggctgagaaaggttccaggtgggctgggtttctagcagtagttgagggcaaagggggtacatgggcgtgttcaggtgacaggtgtctggaactatatgggggagcaatgaggcagcagagaggacattgggcaggctgggaaggagcagagtggcggtacctgggggttgacatccagcacgcacaccttcccagcagcgaccacgccccggatggagtcaatacgtgtgccatacaggttgccctcgtattcgccatgctccaggtagcgcccagcacggacgtcagcctccatctccccacgggacacaaagctgtaaccctgaccttcccgctctgagtctttcggccgccgggaggtgtctagggggatgggggtaggttggaccaaatgggcaggggcaggttacagtgcctcagacacatatatgcacccctacccaggcccccgtttcccagccttggaggtgcagtctgctccccatcttgccagcactgctgcctttgcacacacctgccccccactctccccattggcacacacagagacatgagctggtaatcatggtccagcccagagcccacagaagagaggctgaggtccagaaagggcaatgtacagcccaaagccacacagcaagagccaagcagaccagggcagtgctcttagtcctgcctctggcagccaggagcttccaccacccccgctgtttctgccactaagaagccctgtcttccacaaggctacacacatgcagctcgtagcctgtttcacccgggtgcacagctgggcactcactttcttcatggcttttagcaagtgaaacaagagaaggaaagtggacgccagcccagcccgctaggccacctgttggctggacacctccctcacccttcctgagcctgaagttcccctaaccacccacagagggcgtgcaccccaacccgtgtacccaaaggtaccacctggcctggtgcccatgaagatgcccattcggtgggcccagccctggccccaggggagccctgctccttgtccccaactcagcagggcccagctcccactcacagggcaccgtggtgccatagcgatctggatcccacatgatgagcttgttcttcaggctgcgccgtcccacgccctgagccccaatcagtaccagggttttccggcggaacgggggcatgcgggccacctcctcataaatgagcagctcatgacggtcaaactctggacacagggagatggcgctgctcaccaggctgcacggtgagggaggggcggagctctcagggaggctgagggcaagagggcttggaacaggggagcaggggggagtcgggcagggcctagggacacggctggcagcatctgagccaggcacacgtcgtcacaggtgatgggtggggacagggaaaggcatgccatgttagaggagggtaagggagggggcgctctgatacccacctgcattcttggtggtcaaatacatcattcgcttctttttctttcctgaaaggctgccgcatagggtccctggccatagggagatgggtgagtgaggcagacagggccctgttggatcccagattggaggtgtggggtaggggggacctcctacctgagtttggtgtcagctccaggtccctcttgacaaatgctttccgcttctcctccagcagctggctgggaatgagcccagcactgcccccttcgacatggcatgcctaaaacggacatgagaccaagatctgcctgagcaagaggacccctccctgtgccctcgccctcccatgcaccatacctggagagatgcgggggtgcccgcagctcacctgccaccagttggcatcatcctggtttacgatctggagcaagtccccggcgttgaagcgcaggcctgcttccttgcaggggatgaggctgtctcgggccgggtcatagtcaaagtgacatttcacaaatacctgggcccaggaatcagcaaagggtcgggggaagggtcagcagaaggctgcaggtggaggtctaccccatgccccctcttttcacagagactaaggggcaatggaactgtccccctgcaggagtgatgcctccaggcctgcccatgctcctccctggtgccaacctccctttgcatctagtactacaggattcagatctcaggaccaaggatgcgggaccaccaagtagggcacaggaccctggcacctaatcctggatccctccctccactcaccctctccccttggagaagggctctggtggagggcgagagacccaataggatagggagacagagcagccacacccccagaattgaccaaccaggagacagctatccaggacatatgacaaccccaccctgcgcacgcgcacaaacgtgaagaacgctgaccataatgcaggcgctctctcatacacttgtaccccaggctgtggctgcgtgcataataccagccaatgtgggagcatgtgcaggtgcagcagcggcagaggcctgtcggcggctgcggtcagctgcccctgggctgcaggtcccacccccatcttccctggaggaaaccagtaggagaggagggcctccgtgagacctgcaaccttgacagccaggaggctcagccatcccttgggccttgtgctgggtgaggggcccacctggcggggcagatggggctcctggtagctgggcaggatcttgaggatgacactgccactggcattgcgcaggagctcctgcagtgcgcgggggtcactgcccactggctgcccgttcacctccttgatgatgtcacccacatgcagcaggccttgttgagccaccatgcccccatgcagaatgcgcgcgatcaccagctcgccgccctccacgcggaacgttacaccctggaggtcagagggagtgtaagatgaggccccaattgctccaagtcagaatcttcaaatagtctcctaatagctcctccattcctgtccctacccacccacccccaccctcacaaagtcctcctccatccttctgcctaaattcttcacttacagcaggtactaatgaggggagaggtgggcagactggagaggtgcggacacaggtgtgtgtgcagtgtctatggtctcctgggtcttcccccgaccctttgctgcatcaatccttccctgcacaaagctggccccatcttcatcttcagaccacacttggccttttttgtccgttcattggttattctcaatccccccaccctcaccagcaccacctctggccctgcccagtcctcaccagatgttctccggctgtcttgcggatgcccaccatgcgcacagcatcgggaggtacaggctggttgctgaatgtagggtccaggccagggctggggggtggtgtctcataggtctttgaggccacagagtcgtgcgtctccaggagggactggggggtggtgggaagagaagggacaatggggcagtgtcccgggtctcttcccatcccagatccaacttcctgctggcccatccaacagcagcatgccccagtccacccacctcctgctccctcaccccagccctagcagccaggaacctggaagtggggctcctggaggatgtgggccagctcggcggctgtgctgctctgctcagccagctgcgccaggtcccgcaggatctcctgcaccagctccaggttgttgtctctcacggcctccagcttcgtctcctccagcctctcatgggcctgggggtggaagcagaacaggtggggctaggagcttccccaggagccctgggacaccaagcagggtcctccctcagcccccaggcattttccccatcccaccccccagcccccagcttcagctcctcactcactgacaatcatacccacacgtgcacatgcattccttgctgtctcctttcttccccaaaattactaggacctagtttagggaaggaagaaaccaaaggacaaaccttcctttccatccccttgccacagagggtcattagaagttaccaaattgtccccagctcccaggaccctatatgcattggcgttcaaagatggcttcttccaccagacatcatggttgggtggggccttgaagaccctgaagcccaggatgaggaaattagggaggtagaataactttcccagggtcaatgggacttgaacttgcgtctccaggccctcaactcagtgttcccagcgaatgaggggacaggaaatcagaacacggtgccaggagcaggccctgcacctatttgttgctctgctggctccgggctccataccaaggagcgctgaaaacagaaaaggaatccttcgccagtgaccagcccagtggggagtgttaggttagatgggtcaggaagaaaagaattccatttcaataatatatatgaagaccatttttcccctctgaatctttgaaagatcattgcagacaacacaagccactttaccccaaagtatttcagcatgtatttcataggaacaaagacattctgctgcataaaccacaataccattatcacctgcaagaaatttaacatcgattcattaatacattatgtaagacagtccacattcaaatgttcactcttgtcccaaaagtatcctttataattttattttttctgattcaggatctaattgatgatcatatgttgtagttggttgacatatctttttattctcctctaatctagaacagatcccaataacttttagactttcagaacatttgttgttttgttttttttgtttctgtttttgttttgtagggacagggtctcactacgttgcctaggctagtctcaaactcttggcttcaagtgatcctcctgcttcaggctcccaaagcctgagattacaggcatgagccactgcacccagcctagacatttttagactccaggccagtagtttttaggatgctctaccactagatttagttgattgtttcctcatgattagacttacgttaatccttttgacaagagttctacgtaggtgatcttgtgtctttgtgtctttcccatactttgagactatgtgactattctgttcccccaaaatccttcaccaatggatttagtgtcaatttatgacccttgcctaaatgagttattatactggaggttgcaaaatagtgattacctaattcccatcattccttctacattattggcattctgctataagaatgagcttttcagccaggcacagtggctcacgcctgtaatccctgcactttgggaggccaaggcaggtggattacctgaggtcaggagtttgcaaaacagcctggccaacatggtgaaaccccgtttctactacagatataaaaaattagcctagcatagtggtgggcgcctgtaatcccagctactcaggaggctgaggcaggagaaccgcttgaacctgggaggtggaggttgcaatgagccgagatcatgccattgcactccagcctgggcaacaagagcaaaactccagctcaaaaaaaaaaaaaaaaaagaatgagctcttcttttctccctaccaccttactcctctttctctccttctctctctcatgatatcactatgaattttttttattccatgtgttctaatccattacgatcactatcttcgttgacccagtttatcccaaatttgtccagtgggagccccattcacacctctgtcctgttgacatgttcccatcagtccttgagcatcttcttcccttctggcacaggctcatctgatgcattccctaccccaggtctggaatcagcaatttctccaaggaaccctgattccttttagcaggagatagtatttagaaaccaagatgtggacactcaatacccattgtttctgggcatcatttctttggcagtcattagtagatactaatggctccaaataaaattaaaggatttttctcatcttcccccattccatatttgtgtctcccttctccttcagtgagaacttatttcccaataacatcagtatatttacttatttgttctgtccttcaatattcaaagcagtttcaaaattgctatacaactgctactacctatcacaaatctattagtaaaaatcagccgggaagggtagtaggggcgtaagggataaaagactacacactgggtacagtgtatactgcttgggtgatgggtgcatcaaaatctcagaaatcaccactaaaggccaggcgcagtggctcatgcctgtaatcccgcactttgggaagccaaggcaggaggatcacctgaggtcaggagtttgagacgagcctgaccaacatggtgaaacaccatctctaccaaaaatacaaaattagccgggcatgtggcacatgcctgtaatcccagctactcaggaggctgagtcatgagaatcacttggacccgggaggcagaggttgcaaggagctgagatcgcgccactgccctccagcctgggcaacagagcaagactctgtttccaaaaaaaaaaattaaataaatatattgccctttcttacataaaacacagaacactgtatataccctttgataccctagggcttttatttaactggtttggttttctggctttttatttaaaaatatgtcatagaaatcactccatgaaactgcatggagatcttcctttattaattattattgttagtttgtttgagacagagtcttgctctgtcacccaggatggagtgcagtggcgcgatctcagctcactgcaacctctgcctcccaggttgggattacaggcatgaaccaccatgcccatcttattattttaattactgcatttgactccattgcatgactggattcctgtaatttattcaaccagtctccatgggtatttaggttgtttctaatactttgctattgcaaataatgttgcagtaaatgactccggcatagtattctatatctgtggagaagatcttccatgtaaattcctagaagtcttgctgggtcaagcagcaaatacatacgtaattttcttagatattgacaaattcccctccatgggactttggccagtttgctctcctgctagcactgtatgagggattttcttgaagctcaccaccagagtgttgatcaaacatttgcatgtctgccaatcacatggaggagaaatgatctctcattggggcttactttgcattttgcttattatgagtaaagtcaaacatctctccatatgattaaggaccatctgtatatctttttctgtgaactgtctactcatgtctttcccaatttttctgtcaggtcttggtttttattcttttccctattttaaaaaatgttttctctctattgggaaaattagccctttgtgatatttcttgtaaatgatttcccccagtttgtcacttgtcttttgactctgcttgtggtgtttttgcatgcaaaaaaaaaaaaaaaatttaggtcaggtgcagtggttcacacctgcaatcccaacactttgggaggtcaaggaggaaggactgcttgagcccaggagctcaagaccagcctgggtaagatgggaagcccctgttgctacaaaatattttaaaaattcacctgagcatttttaatcctcattttaatgcatggtggcatgcacctgatgtccctgctactcttacttgggaggctgaggtggaaggatcacttgaacccaggagattgaggctgcagtgagcactgtttgcactactgcactccagcctgagtgacagagcaagaccctggctcaaaaaacaaattttttaatgtgggtgaatttaataatctttcatgcatctgaattttgaggcatagttttttgtttttttgttttttttttaagggagggcttttcccatatacagagccttgttttcttctaggacgtgtatgatttatattttcacatagagatctctgatccgcttggagtttattctgatatatgatgtgaggaataaatacactttgatatctttcaaaatgactatccagatgttccaataccatttattaaaaattcatggcagggcacaatggctcacacctgtaatcccagcactttgggaggccaaggcaggaggatcacttgagcccaggagttcaagacagcaagaccccatctctattttttaaaatttttttaattaaaaaaattcaaaagaaaactattgtttgattttttttttaggtgtgacaatagtagtgtagctttaaagaatccttttcagttgagcccaggagtttatatacacaatgaaacacttgcagatacaatctattatggctgagatgtactccaaaacaatggaggagagagggaagctggtaaaggtgtggatgaaacaagattatgcatgacttgttgaatgttgaagtggggtgctaggtgatggaggttcaggatatattcttaaattttttcataatagaaaatttgtttagccatgagatggtgagatttgagtaatacttcataagactgctgtgaggatttggtgagatggacatagtgcctggcagacagcaggtgctcaataaaggttagatgctttctgccttctcttttcccaaacaggccagggaacagcaccccacatggccccacagcctcccataccatcctctgccgggtgggcagcattttagactgacatccacaacctactggggaaacagacaactgatggggcagaggagtagcatttggggaaaggaacaagccccagagggctggtcttccacagacccctatgtgactttcagtcatttagcttggcccagcctatggagccccagagtgagggaggcgtcccagctctggctctgttaccctgtgcctaggacaatgttggaatcaaagcccaaataactgagtgtcaagaataaacaatggcactcaggcagcaacaatctcaccatggcaacccttgcatggctcttttgggttaacaggagccagctctggcacaggtgtcctgatgtgagcattagagaagtcactcattttgactttagcactatctggtccacggatggaggacaagttttccgaggagacgtgtgtgatcaagggggaagccagggtgcctcctaagctgcttacctcctatctttgacttaatgacattcccaccatgggctaatccattcctcctcctgtggccacccctggacgttttatacccacagatatgaaagcacagctctccaagctcaacctcatagcccagaggaaactttaaacatttaatcattcaaatacaaaaccaacaattcagtaggctgaacaaataattttttttttttttagacggagtctcactctgtagtccaaattggagtgcagtggcacaatcttggctcactgcaacctccacttcctgggctcaaaaattcttgtgcttcaacctcccgaacagctgggactacaggcacgcgccaccacccctggctaattttttatatttcagttgagatgaggtttcaccatgttgcccaggctagtcacaaactcctgagctcaggtgatctgcctgcctcggcctcccaaagtgctggaattacaggcgtgagccaccacacctggcctaaattagattttttaaatgatataacaaggatctaagagaacccaccacccaaactaaaaaacaaagctcttgtcaatatcctacatctaaccacatgccccactcacccttcccacttgcagaaatcaccatcttttttttttttttttttttgagacagagtctcgctctatcgcccagcctggagtgcaatggcacaatctcggctcactgcaacctacacctcccgggttcaagtgattctcctgccttagcctctcgagtagctgggattacagcatgcaccaacacacccggctaattttgtatttttagtagagacggggtttctccatgttggtgaggctggccttgaactccagacctcaggtgatccgcccggctcagcctcccaaagtgctgggattacaggcatgagccaccatgcccagctgaaagcaccatcttgatttagtgtgtttgtcattccctggcttcccagttaaagagttgtaatgtgtctgtatgtattctacatacttctgaaattctgaaatgaatatagttaataaaaagggaattgtgtctgtccaaatgcgtttttttttttgtttttttttttttgagacagagtctcactctgttgcccaggctggagtgcagtggcgcaatctcggctcactgcaacctccgtctcccgggttcacaccattctcctgcctcagcctcccgagtagctgggactacaggcatgcaccaccacgcctggctaattttttgtaattttagtagagacggggtttcaccatgttagccaggatggtctcgatctcctgaactggtgatccacccacctcggcctcccaaagtgctgggattacaggcgtgagccaccgcacccggccgtattttctatgacataaaaaaaggggggaatcatgattttatccatccctggggtctgattttttttcacttaacattaagtgaacaattatttcccttactgcttttttactcactattattttgctaagacttattcttctttttcatgttaagtgacacatggcccagaactagaagagtgatttgaatttctgtggtagccattcatttcattctgctctgaaaattatcctcagcaaagcaggggctcaagctcatggtagaccagaagcttaagtgggagacacagctagtttatagtggcaccagcctgcactctgttctgtttgctcccaatccagagctgtagcaggctgcaaatgcaaacactacacagtcatttcactgaaaagttttccctctgccctccactccaaccccccgatcatggcaaaagacagggaattcctatttgaagccctggttcataattaaatagttaaattaaaagatgtcccagagagtagtgtgtcagaaagtaaaggaactctttaatctgggtttgacagatgtgacttgctttagccaatgggccattatcaaatgtgagcagaggcttagaaagtgcttgtgactggaggcttgtccttccttgcttgtgagactaccatgtgaaggtggctgaggatgagagaccctcctagaggatgagagaccacatggaaaggggtctggccatcccagacattgcagttttcccagctaagacaccagacatgtgagtgaggccatcccggaccacccagccccagctaagcaagcccaggccagaagaaccacccaaccaacccacaaaatcaggggaattaaatcacagttgttttaagccacgacacagcacgatggtttgttacacagcaaaagtgaactgatacactggcctcaccactacaccctctgcttgtcatgtccccttgtcagagcccctatcttagtgacctccctagacctttattcttctagggccctgtcttgctttcccaggtcttccaccctagcctccccacagaacaagaggcctccctgtgaactctagtctgaagctaagattataacaactcttcctgattcaaaaatcacttctggccggggtggctcatgcctgtaattcctgcactttgggaggaggccgaggtgggtggatcacctgaggtcaggagttcaaggccagcctggccaacatggtgaaaccccatctctactaaaaatacacaaattagccggggatggtgggcctgtaatcccagctactcgggaggctgaggcaggagaatcgcttgaacctgggaggcagaggttgcagtgagccgagattgcaccattacactccagcctgggcaacaaagcaagactccgtctcaaaaaaaaaaaaaacttacacttccataacctccacctagccccaccacgactctgagggataggtatcattctccccacttctcaaaagaaataactgggctgggcatggtggctcacacctgtaatcctagcactttaggaagccaaggtgggaggatcacttgagctcaggagttcaagaccagcctgggcaacacggtgagacctcacctttcttttaaaataaatacataaagaaatattaattttttaaaaattcctccataagaaataactgaagttcagagaggttgacagatataccaaactcacaaagctggtcagtggaatcttctgactccaagccctgtgttctttcttcttcatctcatgtgaattagttcacaacagccttcacatgcctctcagctgtccccattagtaacaatttttctgaatttctgaatgtcccctgccttggattcctcaccttggccttgtctgtagctggaacacctgctactggatccatgtcagccgtcccagatgccagccacctgccagggccgccacttgctgtgtgcagccaaccgcctggacttctgatctctctgccagacttgacttcccttagggcctttaaccctctgggtttgtatcctcaggccctgtccctccctggtcccagatctacccagcctggcccctcctacactgtctgccacatccccagacagagtcaagcccagctccacagcgtaagggagggaggccaacagctaccacatgtggctccaatctgatttcattcctgtgggtttctgggccacttcacgaagtttttgcagctggatctttgatcacagtgctttgtctattaggttagaaatttgtctgtgtacacataatgattaaaattggtgagaaggaggaagtaggtcccattgtccaatgcagggagctctgagagacactgtctttgatgagaggagtggcaaatttacattgcaaaggctcacccatacaaggacagaagaaatgaatggcttttttttttccagtgggctcaggtaggctcctttatggagattcacttcctgtttgtttcacaaccacagggagaaagaagttactggattgccttagcccattagcctcatactgggggtctcagaggggaagaaacgtccatactctcttctattgtgctctacaaatccggaaccataccaggaatttcttggaaaaaatcctgaccagcttctcgccaaaaacgtttccagagaagggagtttacttacaatgtgacacagcacattggttcattttcaattaggctttactgtgaggtcccaggactggggcattgtggtgtccagtgaaaggaagacagacttgggcttcatcaggaaaacaaactatctggcagttcactgccataaccccagcactgtgcctggtatgtggcgagtgcaaaataggtatttgatggatggatggatggatggatggatggatggatggatggatggatggatggacaaatgagtgaatgacatagccagccagccagcaaacccatcattagagagctgtcgagtggactgtcgagtggactggaccagagaggaatgctatcaagggggaccctgctttgaagggtattggcaagagggctgtctcattctgagactctgccatcacaaagcagagtctcactgtctcactgtggagacaatagctaaagtacccagaggtgatgtgggctcataaacccaactctgaaatcaattttggaaagttacagatgttgaggttcaaaactgcacatattcatcaatttcattgccaagtgtccattctagagaaaccctcatatgcatgcagaagcagatggatatgaggatgttcactgcagcactgtttttaagacagcaaaatcagcagtgacatacacatctctcaggaagggaaccaataaacaaacagctctattcatatattagaacaggggtccccaacccccaagccatggaccagtactgatccgtggcctgttaggaagtaggtgaacagcaggaggtgagcaagcattactgcctgagctccacctcctgtcagatcagtggtggcattagattctcacaggggcaccaaccctaccgtgaactgcacgtgccagggatctaggttgtgtgctccttatgagaagtctaacaaatgcctgatgatctgagtggaacagttgcataccaaaaccacccccctcaccctgatccgtggaaaaattgtcttccacaaaactggtccctggtgccaaaaaggttggggactgctgtatcagaacaccacaccgcagttcaaatgaatctccctatctctatctatatctatacttaggtcgatagctgtactacttgtatgaaatagaaatctcaaaaacagaagcaccttacactatcatttcatttatataaaatttaaaagcacacgtaatggccaggcatggtggctcacgcctgtaatcccagcactttgggaggctgaggcaggcgaatcatgaggtcaggagttcgagaccagcctggccaatatggtgaaaccctgtctctactaaaaaaaaaaaaaaaaatacaaaaatggccaggtgcggtggctcacacctataatcccatcactttgggaggccaaggcaggcggattgcgaggtcaagagatcgagaccatcctggccaacatggtgaaaccccatctctactaaaaatacaaaaattagctgggcatggtagcgcatgcctgtagtcctagctacttgggaggctaaggcaggagaatcgcttgaacccaggaggcggaggttgcagtgagctgagattgtgccactgcactccagcccagtgacagagtgagattccatctcaaaatatatatatatatatatatatatatacacacacacacacacacaaaaattagccgggcatggtggtgcatgcctgtagtcccagctactcgggaggctgaggcagaagaatcgcttcaacttgggaggtggaggttgcagtgagccgagattgcgccactgcactctagcctgggcaacagagtgagactccagaggaaaaaaaaaaaaaaaaaaaaagcacacataacaaaggtagagccagtcatggtggctcatgcctataatcccagtgctttgggaggctgagaggattacttgaggccaggagtttgagactagcctggacaatgtagcaagaccctgcctctacaaaaaaatttaaagattagccaggcatggtggtacatatttgtagccccagttactcaggaggctaaggcaggagggcaggaggatcatttgagcccaggagttccaggctgcagtgagctataattgttccactgtactccaacctgggagatggaataagaccctgtctaaaaaaaaatcccacaaaggtatattgtttacagctaaacacatatgtaggcaagataagccaacattcaatgaaatgacatcaatctctaggcagtggttacctgtgggaagggaatgcagtgaaaatgaggaaggggagaggcattaactgtgccaaactttttatttatttatttatttttttttttgagacagtgtctcactcggtcacccaggctggactgtagtggcatgatcatggctcattgtagcctcgacctacccagctcaagcaactctcctgcctcagcctcttgagtagttgggactacaggtgaatgccaccatgcttagctaattctatttttttatagagacaggatttcaccatgttgatcaggctggtcttgaaatcctgagctcaaatgatccacccaccttggtctcccaaagtgctgggactaaagctgtaagccacaccgtgccgtgtgcctcatactttttatttcttaagaagaaatggcaagagtcaaaacaaacattattaacattttggagatgggtactcaggagtttgttatttttttatgctcttttgtatttattcattcaacaaatattcagtgagcacctactatgtgtcaggcattttgtaggctctggggatactgcagtgaatcaaaaagacaaacattcctgccttcatggaagtctctatgtttgaaatgtgtataattgttattatttatttacttatttattgaagacgagctctcactatgttacatgaactgcacttgagcttcttggcctcaagcaatgctctcacctcagcctccagagtagctgggactacaggtgcatgcccctactcccagcttcttgtctttatctttagtaaatgagtaggatcttcgattgctgaatgaaaagcaccctgcctttctccaatctcctccaatctgctcagttttctcttccccagaacttcccactattaaacctctgcaacttttcatctttcgctgttaacaatcttcccaagtcttcaaccattccacagataatgtgaataggctacaatccaaggacatggtgtcccctgcagcagcaatccccactccagtgggacgtggtcctccacatcccatgccagggccagccatagccagcctgtgacagagtccccgctctacagaaaacccaccacctggctataccttctttctccctacccttgctgtcattgccgacttcctggtcacctccaccaccatgcactgaaaaccctggggactgcctcagtcttctccccaccctgacgcctgccatagccctacatgccaataggtgtgtggacaagcccatcccactcctgagccttccatttctgggtgtcttcaacactgatgacctacctgtccactgcagccccaccctacattatcatggcatccctagaactgtcctccttggaaaactttcacctcctacctcccttcctctgaccttggtctttttctcttccatctatatccctaccatcacccctcaaatactctgtgacctcagagagccaccgagccttcacctccattttctccctgttctgcctctttccagcctgggcctcttttctctgagcctctctcaccagctcccttcacaattccctgcatccgacttccacagccccaggccagcacgtgccctggaccaaagcccccgctcctttctcttcctctctggatggagtcacccccaccctgggaaatcgggcacctgacatggacagtcgaggtccccatccatttaattccttctccctttcagtgaccagtcaaaccttcccttctgaatcttcctgctccatctctgatccctaattcccaggagaggactgctccaccttcaccaagaaatctgagcaattaggtctgatttcccacagctcccagccttgcctccaacgcagccatgggcaccatccccacctccccccctcaggagagggggcatccttccacactccctggggcaggatcccaggtgccttactgtaccctagcccttactgccaaacaccaagttccaccagtttaccctaaggtctgggaccacagctccatttcaggctctcagcatcttatactcaatccactgaagagccactaactggcctctccaacttcagatataaccccccaacagtcctccacatggctgccaaaacacccacatttggccatcatatccctgcttaaataatgtaaagcctgccaggcacagtggctcatgcctgtaatcccagcactttggaaggctgaggcaggcagatcacctgaggtcaggaattggagaccagcctgaccaacatggagaaaccccatctctactaaaactacaaaattagctgggcgtggtggcacatgcctgtaatcccagctactcgggagactgaggcagaagaatcacttgaactcaggaggtggaggttgcagtgagccaagatcacgccattgcactccagcctgggcaacaagagcaaaactccttctcaaaacaaaacaaaacaaaaaaaaccataaagcctccctgatactcacagaaggatgcccaagcacccacatacagcccccagtgccctccagacctgccaacctttgcacagctcgcattgtcttacacttgaggctcagcctcacaccagcccttccaatcccctgcacactcctgactctttcttacctctgtgcttctgctcaagctcttctgtggcccagaatgccctccccctcttcctcattcttccactcagctcaagtggtccttcctccaggaagccctcctcacccaccccaggctgggttagacacctgtcctttatgctcccaaaatgcatagtgtatccacctctatcactgtcattaccaaattgtcctataattttctcttttagtcaatctctccccaacctgatacatggcaggtgaccttagaaagacatacacacaaaacgcccaaaggcagaaggacaggcaagatgaattctagagattctccaacatgtgcatgctagcccgcaccaatcacacactccacaagctggcagtcaacaaacatccacccacgcactcaccagacaggtgtgggggcagccccctctacctgcagccactcaggtcatcacctgggcatgattttcttctacaatccccttcaggggggcctcttgtgccacatgtcccattcccaaagccctctgtagctaataccccatcccctactgtgcctccccaagcacagtgcccttgtgcccacctccctggagcactgtaccttggccagggatcttactatgggactttccataatgcctcgaaggaagatcaggtccagctctgcagcccccgtggcactggggagggatcccaagttgtccaggacttgctgcatggctgggggaaggtacgggcagtgagatacacaggtaccagctgggtacagaagaccaaaacacaccacaatacttgccacttccccacccccatgtcccacagaaggcagcccctccccggcaacattcccctccctgcccagcacaggcaccccaggcccttgaatgcctgggacagggatcctggaggaaggggacaatttccttggcctgttctctccaccctaggtaatgccagcctgagcaggtgggaggctccaggcagctggaagagactctgaggtggagagaagggagaaagggaagcaggtgtcaggttgcagatcctgccctgcaccagaaaaccacaagctgttgggtggatcacttgaggccaggagttcaagaccagcctgggcaacaaggcaaaaccccatctctactaaaaataccaaaattagccaggcatagtggtgtaggtctgtaattctagctactcaggaggctgaggcaggagaactgcttgaacctgtgaggcagagattgcagtgagctgagatcacgccactgcactccagcctgggtggcagagcaagactgtctctggccgggcgcggtggctcacgcctgtaatcccagcactttgggaggccgaagcgggtggattgcctgaggtcaagagttcaagaccagcctggccaacacagggaaaccctgtctctactaaaaatacaaaaaattagctgggcgtagtggcaggcgcctgtaatcccagctactcgggaggctgaggcaggaaaatcgcttgaacccaggaggcggaggttgcagtaagctgagatcctgccattgccctccatcctgggcgacagagcaagactccgtctcaaaaaaaaaaaaaagaaaaagaaaagaaaaccacaagctcctcactcaacctctagatgggctgaagcccagggctcagccacctgtacctggcaggctcaaggatgagacagacagtactcggagcaagtccgtgagtacaggcccagagtcaagcaggcagccacacaggagccagggcctgcagcctccagtctaagcaccactaattcagtgtgacattgtacaagtcactgtccctcactggcctcagtctttcctgcctgtaaaatggatggattgggctagatgatgtttacaggccttcagctctgagtgacaatgatctataatcactgagaaattaacatggatgataggaagtcaaagctgaggcctggaacgctggcaggagctagggaaacaggcactggaggccttggtgtgacccaaaggctgaggtcacaccaagtcatcacagggataagcaaactctcagcccgaaatgggacataatggaggacacgataacacctgcagctgggccgcaacaatgcccccgagacctgaggtgagggctgccttcactcactgacagaggtgggagttccaggctgtggcaagttccggggaaaggaagcgagaagcagaatgtgcccagctgggggcagagatgggcgaagggtatcattactctgccaccatgccgcccatgcctacatctgcataacagtacccaagccacggaggacggcggaggatgcacccctggcgcctctcaatgctcttgtcagtgcccccctcctccaggaaggaacaggagtggggaggagggggcactggaactggagctggcagagatggttcagggactcctggactcccatctccttcctcctcctgctccctgccttctccagaaaaaaaagtgcaagcttgcccttcagacccctcttgcccaggccggggcttggcattggtcagagacctgcgaggccctcagtgggctctgaaagaggccagggcagggacccttcccttcctgccagggtatgccagattccctccgttatctaggggaggactgagccaagggagttggtgccctctgcccaggacagctctcctgaaggtgccctcagatgacctctcccaggccaccctccccagatgccccgactctgctggaggaaggtaggctaaggggccagctgccccgcccccatctggcccgcccttccctaccttccctctggagctccgcttcctcagaagactccagggatataccctccaaggagaccccgctgcctgggctgcctgccatggcggcccccagacccggggactcccggagcgtcctacacgccgccgtctaccgcctccccagccaaagcctggccgggctggggaaggcgggagtcgaggagcgccctctgaggaaccagccaatgggaaggctcagccgccgtgaccgccttgctgattggctaaagccctgactggcgctgcgcggtgcagagcaggcggtaacccgggtgggagaagagtggtgggagggagccctagtcccacagattgcccgatccccagcatgtcagtgtcggtggggatggggaggaggcggctaacaggaagttttgaggagggggtaggcatgctgccccttcaagactggcgcggtactccgagaccctcccctcacagccagcttcaggagacccgagggagaaaagtcttggcccatcttgtccctgtaccctcttttctagaagcccctcctctaatacaccccatgccacctcctccctatgccctctgacctctgctctcagtcccctctccaggccctgtttcctttacaatagtccctcagtctaaggaagtccccaagaacgactcagccctccaccgggaggcagcctcacttgggcatggggcaaatacctcaagcctcagacgcctccccctacccacccttggtcagccactgggaggcagggtacgtgggggaggtggcatcgctgtgggtagggatggtgccccagccctgcttacccctcgcctcacagcagcttcttcccctcccccatctcccatgagttcttcctcttaatgaaggggatgatgcccaggaagcaagtcaggcatcttggaactcagttccccagaaaggaaaaatgagggcacatttgcacacagggaaaagtgtgggcagaagggaaggactcagctccgctccggtgaccccattcctctgagatcttgtgcccaagaggccaccatcagggtactgcagcctccactcagacattccctgaggagtggcaccaggtcgcattgcacccctggttgccatgacagtagaattacacaccaggacagtaacccagggatggaggagagatttaaagggacagctccacctgaaagcagccacatatcccagccttgatccaaaaaagggagggaatctggtgacaggggaagagggagcaaggctgcaggtcaggagatgccaggttcaggatctctaagttctcagcccagtgccactgtccatttatctcccaagtctcaggaaaagggcccctgactctacccaaagtagatatggggtctccctgcaagaggaatacacccataccctttccctcccttcaaccatactgacccatggggaagggcggaaaaaggatcttattagctttgccctttgcagagtccaaggcagggatctcccaggggaggaggagggaaggggagcctgaactcagaggcagggacacagctgtctctctatcctgtgggaagtataatgaccaccagataataaggggcagaatccaccattagatttttgaagctgggagctaatgtagctcaggataggacagaggctgcctgaaggaagaaaaacactttgtacttcttcctttgaatatgagaagccaggagcagcccctcgaacaacatgaaggggagcaggagccccaggagtcctttgaggaagcagaacccaccgccacaccccaaggctccactccctgtcccccatcctcccccaccacgcccccatcaagtggtctgcaacaacgaagccaaattgctgggcttgctcctcctcctacgccccagtcaggcactattggtgggtttactgggcagtcccggctggagaggccattaagcacaggctcaggggtgggtttaattaatgcctaagcagcttacagtggggcctaggcaggctgaaagaggcagggagaccccagggagcccagcaggctggacaggagatgggggactgagccctctgatgctgcagaagctggggacattggtgccatccctccactgcaaggagaagaggcctttcctggacaagtgtaccacagtttaggccctggctcactcccttcactttctcggagaggaggcacagaggaatcattctacccaaagtggcagccctggaacctctggcagaggcagtagtggggcctagagcaagggaaggagctgcatgggagggaggcatccaggcagggggaagttcagacaactcagagcagaaccatagcagttcccagctgcccgggcctcagagggcctctagcacagggaacttaaccttctggggtcctgcgtgcactacgggaatccatgatcccctagagtagaatataccttttgtgcatggatgtatatgtctacgatgagggctcactgctgtcaccagattctaagtgactcaggaccaataaaattaagaacaggccaggtgtggtggctcatgcctgtaatcccagcactttgggaggccaaggcaggtggatcacctgaggtcaggacagcctggccaacatggtgaaacccagtctctacaaaaatacaaaaattagctgggcatgatagcaggtgcctgtaatcccagctacttgggaggctgaggcaggagaatcacttgaacctgggaggtgaaggttgcagtgagccgagatcccaccactgccctccagcctgggcaacagagggagactccatctcaaaaaaaaaaaaaaagaaaaagaaaaaagttaagaacactgatcttgtcccatcatctcatcttagggaaatctcaggtcttcaaaaggaggtgactgtttcaaggacacagggttaatgccaaaataacaactcaggccaggcacagtggttcacacctgtaatcccagtagtttgggaggtcgaggcgggtggagtacttgagctcaggagtttgagaccagcatgggcaacatttttgtctttacgaaaaatacaaaaattagctgggcatggtggtgcacacctgtagtcccagctacttgggaggctgaggtgggagaatgacttgaggctggtaggcagaggttgcagtgagccaagcttgcgccactgcactccagcctaggctaaagagccagaacttgtctcaaaaacaacaacaacaacttggtggcagcggcagcaacagcagcataataattatgactattcctaaaagtaatgtgctctcccattacagcctttgcgtctcacagcagcctctttacagaagaagaaatgcgagctccaagaggttaagcagtttgccactgaggctttgctagtttgtctgagtggcccactcccttgtcctaatgcctcctacagagccacgtccaggtatcctaacctggtattcttgttccttcactcacagcttcctggtccccagtaccccctgtccacctctggcacatgctggcctagtgggcagcgattatggacttctcagccccaggctgtgctgctgtaatccctccacccccaagccattctccaaggcccagctccggggccacctcctgaaggcctggtcctatgccactgccctccagcaatagtacgggtcacctctggagcatgcatcccctgccctccacggaggtgagttgtgctccagccctacactggagcaggtatgggtcttattctttctcttctccgttccagcacaggaacccacacagaggagatggccacagcagctgccagaaggaatggctgagtggtagggtggacagcagtggagccagttggttcttatctggagctgtgcaagtgcccacccctaagtcctcgcctggcaccctctgaaccactgaaataagctaacatcctcacccccttcttaccagtttcagagttggtggcggcaaccggcatggtgaaggaggcaagggctctgaaacgtctctcctggagaggggagagaggaggatgagcagatacaagggcaaagcaatggggaagggaataggaagagcctccccttcaggacgagccagaaaggtaggggagaaggtgctgcccagaaagtgggggttggagaacaacaatgattccaacggtcctgggaagcaggaagagcaggtattactcgcctatttctctgaggaggaggagaccagggaggataagggaggttaactgatttgcccaagttcacaaagctaataaggagagctaaaatgaaaatccaggttttatgactcaaaaataagtatataaataaagtgtttcttcctgttgtattttttgtttgtttgttttttgaagaggaaacaagtagaatttttagagggtaagactataatttggctgagcaaggtggctcacgcctataatcccagcactttaggaggctgaggcaggagaatcacctgagcccaggagtttgagacccacctgggcaacatggcgagacccccatctctacaaaaaaattaaaaattatccaggtgtggtggtgcatgcctatgatcccagctacttgtggggctgaggcagggggatctcttgagcccaggaggtcgaggctacggtaagccatgattgcgccactgcactccagcctgggcaacagagcaagaacctgtcttaaaaaaaaaaagtcatttaaaaaataataaaagagtccagaatttgagccaaagtagaaaacatgagtactcctagactgcaggttccctgagagtcagaaccacattgattttatttgcttctggaacctaggcctaccaaagcgccgatgttccacatttatctggggggctgacagagtgatatctacctctccacggcccctctggctggctctctctcctctctccctttcttagctcagagctggcacaaggagaccaagtgctctgggcagaaccaagcatggagtctacagccccagtttccattccagggcctccccaggctaggagtggctccctcgttctcccaggagagggcagggggttaccccccacccttcttccctttgccttcctgggcatgtgctgctggataaaaccctaattcccagttgccatgacaacaggaggcagtggctcacagcaggggtggggagtggggggaagcatctggcagtgcccactttaggactgaatgcctgctgagtcctgggggtgggggaaccacggcaactccacctccccccaaaagaggattcttcccagaggactagtacctgatttcaataaaaccctctctgctcccattcccttctcaggcctgagctggtcacctgagctcaggtgacagaaattacaaaagtgagggggatggttccctttcctcccagctctgccgctgaggacatggaataaaggtgctttcagggagaggaagggcacccctattcaggctacacccaggctggaagaaatgcccaggatccactgtgctggcccgtgcccctggtgccaatctctactcctagagagcagggaggagggatcccttccctccccctcccaggccttgatgacctggagccttctcctggctggcgctgctctccctcacagggtcagagaagggactccagaagtcctccttccctagagcgtggagggcgggaaaaggcagggaggatcctgtatgaaatccctgcgctcggaagtcttgcccagcctgcctgggttttctcccggggaatcggttcccagagcatcggctggctttgctcccccacgcccgtccaagcctctgagagggcggggcctggctgtgtccacaggagaacggcagtgccaggcaagctagcctggctccgtgccaaggtcctgcacccagacatctgggaacctgcacctcggcttccaaaagcctgggcccagatgccctctcagctctgcctccgagatatccacatcacccatagtgtccgcaggcgagcggaccagcagtgaaagggagaggtttcttccaacctcccacccatccctccatccatacacatacaaagaggtgcggagaagaaaggtctgacaaaggcgctttggagagcgagaggtcgcggggaggtctggacagaactgagggccagaggatggggtcgaaaggccaggcggacgtgcatgcttggaccatcagatcacccctgccccaacggacccagccctaacaccctgggcgctaggacctgggggaggggggcgtgttgtgagccatcaaagaaggctctctacgtgcgcgcccgccggagaccagggatgaggtcactaaatgactgccccggccaacccccaccccgtctttatccgcaccgccccccccttaattgacctaactttctaaccctagctcttcgcttctggcaccggtcccctcccaagtctccagaccctaaccctggctcccgacccgccccgctacagcttgggaagcgggagaagcagcgcgcgcccttctgcggaccccctcccagggaagattgtggtgttagctgcctagggggaccagggggccaccgggacccagcgcaacctctgtctcgctccccaacccccggaagcgctaacagcacggttcttacgtaatgccgggcttctaagtacccccaacccgcacagcccccggggaggccgcgcagataccggggcccctcacagctcaccaccttggtgcctgaagccactttggagcccctaccgcaggggcggggaccagtgtcaatgggcagcggggcttggttctcccaaccagcaccccagaaagagggcccaggggcgggggcgggtggacagggagggaacgggcctgggtgaaaggggcctgtggagtttaaacccagtgaatagggtcctaagtgccgtgtcaggacgaaaagaaggcggaggtcttgggataggagctggcccgggggccgggggacgcctacctgcgccccgggaagcccctagctccgggcggctccagcgcagccgggcgctcagcgtttattgcttgtcaatcgctagcccggctcttaaagcggcaaggcctctccgcgagggggcggaggtccggaggagaggggaggtgaggagaacgcggaggccggcacaactcggaggaagtagtctttcccagcagctggtacgggggcagccaggtagtggtttgggagacaccgcacagaccacgacgccctgctggagtcccactgggaagggttagggaggcaggactggtaccagtacccgctggtgcccctcggctcccaaggatcccttaaaggggcgatggtaaaagtgcctaatgagaccggcttgattactccgcccacccatcttggcttagaccggcgttctagttccaggcgtgcctcacttttcctcgttatcctgcttccatattgagaaaaagaataggaggacttcagagagactcccaggaagcaggataccagccccagaaggcctcgggatcaggggcagctttttaaggactcagagggtggatatccggattccagactttccagaaattttgcaaaaaagaggaaatgtcttcctgaaaggattcgagagcctcttttaggtctaggtgagggaggcctggtccattttcctgcctatggaataaagaagtaactggctagccttcctcagagtcccagcccaaaaagtaaataaagggttaaacccactggcccgccttcgcccagcctccggctccaccccacatctgctagtaaaagatgctgggcctccaaatacgggaggctctgtgcagtgcgactagcatttggggccagctacgctacttctccgacctcggcgttcagccaccccgtccagttgccctgaacaaaatgtgagagtcatcccttttccttgctaactggattcctaagatcataaatggactgcatctttggccgggcgcggtggctcactcccataatcccaacactttgggagtcggaggcgggagcatcggttgagcctaggagttcgagactagcccaagcaacatagtgaaaccccatcgctacaaaaaataaaataaacaaaattagctgggcgtggtagcgcgcgcctgtagtcccagctacttgggaagctgaggctgcagtgagccgagattgcaacaccgcactccagcctgggcaacagagtgagaccctgtctcaaaagaaacaaaaagaaaagaaatggattacattctggaaacttgcttggaaatctcagaaatgggaatctatcccgaaagcaggggactggtccctgggttccaagactcagctctcccctgagttccaagggtataagtttggatataggaaaaagccacagaggcggccgaactgctgaaaaccacattgtttaggtgacccaggcttttactgagagaagaaagccatcgaacccagatagctttgacaggaattgcaggctttggtctctaaacaaagagggttcttggagcgcattgcttgcagctctttcctctatctgcaagctagaaaatccttcttcttcttcttcttttttatttttattttttgagacggagtttcgctcttgttgcccaggctggggtgcaatggcatgatctcggctcgtcgcaacctctgcctcccgggttcaagcaattctcctgcctcagcttcccgagtagctgggattacaggtatgcgccaccatgcctggctaattttgtatttttagtagagacagggtttctccatgttggtcaggctggtctcgaactcctgacctcaggtgatctgcccacctcagcctcccaaagtgctgggattgcaggcatgagccactgcacccggcctagaaaatccttataattgaattcaggaagagttcccctttccattataaaggctaccctccactgtcacctgtccacctctgggctggaaatcactcagctatttgtattttggaagaggaaggatcttgaatctctacaagatattaattacttcttaatcaagcaattattacctccatagcgacccacatcaaatcttccattccatttaggatcctcaggacagtctgggatctcagattctggcccacctggggaggtggagcccaactcattattcttagcggctgccccactgcattcgtcggtcaacaagtatctctctaataaaggccttgcagaatgccagcctctcacatctgttcaggaccttacaattgacaaattgtttcattctcacaacagccttgtgcagttacagaatgagaagaaacatttattgatgcagaataggatgctcctcttctgtgccaggcaaggtaccacttactgtgatactgagataagggccctaacctcctagagttcacagtctggggttgaagtcggaaaggagtgtgttacatagatacaaaaagcgcttcttggtagcacagctgaatgccataataaaggtgcagtgtgtcctaagctgttccccaaaggaatagagctgctaatggttggcaatggagtagctgggaagggaagcaggtttgaaggtcggcaatgcatcccctagtagttaagggctgccccctacctcaagaggggaatgagtcctccttctctgaggtttgtaattagctctgccttcctccctgcctcagcctcagaggtcataaaggtgcaggtagtatatctccttcccccaaaatcaaggtattcctatggtggtgttcagcccagagttttgggagtcaaggcacagagaaaaataaaactcaaaagtgttacaaatttccagcaggtaaggctttgcactgagtgatggtgcacttcctataatgaccagcaggggccaccaacagctattcccagtttatctacacccagcctctgaggtgcttcgcctccacacctgcgactggccagtgcctagttctggaaaccttatttatggactatacttaaaaaaaaaaaaaaaaaaaaaaaaaaaaacttgggcgaggtgccatggctcacacctgtaatcccaacactttggaaggccgaggtgggcagatcatgtgaggtcgggagttcaagaccagcctggccaatatgatgaaaccctgtctctactaaaaatacaaaaattagctgggagtggttccgggcgcctgtaatcccagctacttgggaggctgaggcaggagaatcgcttgaagccgggaggcagaggttgcagtgagccatgattgcgccactgcactccagcctgggcgacagagtgagactccgtatttaaaaaaaaaaaaattagagccttcaatggactatataaaattatataaatatttgcctataaactatatttgtgttattcaactaattagtatgcatattagaaatcacacacatagggatgaatttttattttcattttatttataaataaataaacatattttgagacagggtcttactctgttgcccaggctggaatgcagtagcatgatcatagctcactgcaggctggacctcccaggctcaagccatcctcctgcctcagcctccagagtagctgggaccacagctgcatgccaccacacctggagaattttttttttaattttttgtagagatagagtcttgccatgttgcccaggctggccttaaactcctgggctcaagtgatccacttgcctcagcctcctaacgtgctgagattacaggtgtgagtcactgcaccaggccaggattaattttttaactataaatagaaattccaattttgtcttcccatacccaaaaggatcatcttgcacacccctaggtgcacacccactttggaaaccactgttctaaaggaaaagctatgccgtcctccctagtccccgcctcaacagggcatccagacaggaatggatccagacagctttgccttcccaccaggactaaaccaaggcctccgtgaaggaccaagtttcctggcctcttgctcatcccacaacctcaagacagaaattgaagcctcctccgccactaccactaccattaccaccagcctggcctgcgttcatgtcagattgcctttctagagggcagagccccaaaacctctcttgtaagcagcatctgttcctccacctggcccaacaattgcactttcccttgcctcctgattttagtctgcccacctccctattggggtgggaagttctggaaccagacaattttgtgttgaaatcctggctcagccacttcatgtgtgtgtcttaggccagttaaataaccttgccaagcctcaatttcctcatctgtacaatagggataacaactttgggagaggacagaggtagagtggctgccatgtgccaggcacacagaaggtgttctataaacgcagttcccttctgggagtaggtctaggcaggttctagctaggtgccagcgggccgtgggtggttagtccttatctctggctgtctgctgtgtcctggctgacttcaggttctcctgcggaaggcaggatccaccccagggcttctggagccccaggtatctgttacagatagcatgtcctcttctcgctgcccacacactctttactggcaccttgcccacatccatctgtgccacccacttctcttttcctcctctccctccagcacctccactgaagtgccaagggctttgatatgggcatcacgtgaggggccagtaacaggtggcccatcgccaaagtggggaagagcttgcaaaagtcggtgcatcggggtgtggggtgcatgcctgtagtcccagctactcaggaggctgaggcaggaggaccccttaagctcaggagttcaagaccagcctgggcaacatagtgataccccaatctctcataatagtaatagtagtaataataataatttttaaaagtcagtgcaaaccctgggagtggggggagtcctgctaaccaccccaatgacccagtgtctattgctggagcccccctacaagccaaccataatttgaagtgtccctgtagaccctggacagggcagagattgatgagggagtgggtgagggagtgcaggaagcttctgaacagtaggagttgaagaggggatcaaagcagaaagtagacgcagttagatgccctggggaccgcatgaggcacttgagttgctctttggagacagatcagaggagtgtccccgcttgaactagtgacctggaggagagctgtacatatacatacaccatgcatgcgtgcacacactcacatatacagacacacacacactcacatatacacactcaccctacacacacacactcagacacactcatacacatacaccactctcacacactcacatatacacacacacatatccctacacacactcacatacacgcacagacacaggcactcaaatacacacatacacacactcacacactcacatatacatacactacacacacactcagacacacatacatatacactcacatacacacataaacacacacatacacctacacactcacatacacacagacacactcagacacacacactcaaatacacacatatataacactcatacacacatttacccatttgagtacacacactcacacacagatacatacacacttatatgtacacacatacatacatgcatacactgacatacacatacacatacactcacagacactcttggatacacactcttggacacacacatacacatacactcaaacacagacactcatacacacaccctcatacacacactcatagacacactctcacatacacatactcacacatacactcatgtatgcacacatcctatgctgcttccctccccgcttgtcctggaccaacgcagtgcttacagagtagattggagcccagacagaagagggggccagggctgtggagaacactgggtggcctcaggcaagccatttgtcctgggctttccctgctgttaaacgggcaggataatatccacctcgcaggctctgcgaccactgcgtggcctgataaaaatgcgctgtgagccatgatgggggagccctgggcacccaggccgtgccctggccatatcccttcctaggaatgcaggacagtccatcccagagctattctctgcccctcccctgccttgaccacccagcgactctgtccccagccctgcttggcaccaactgcccaggtccagcctcccccacgccccacagggatcttctcgttgccctcctcattggggttcacctaccctgggctcaccctgtgcacctctcctctctgaggtgcctgaggacagagcggggaacctcctgcccattccctgccaccccataggggcttcaagccctctgacacctctacttccagctcgcttccctgaggtactggtatggggagatgtggagccctgggaaggggagaagctgccatccacccctccccaaaaatggcctttttccaggccagagccatgtggggggctgtccccaccctcaccagtacagactgtaggagcacccgccatcacccaaggcagactgggaatctgcaggttcttggcagcagacctcagataaagaaacaagcaaagaggtcaagtaatttgtccaaaggcatcacatgggtcagtgtagagctggggcttgaccccaggcagttggcctcaggctccactgcagatgctgcacctcgctttgcaggtactatcattaccttcattttatagatgaagcagctgaaggtcagaagagttcaatgacttgcccaggatcacacagaaagcgagtggtggaagccacgcttagcgggtaagcttagtaaaaagcttagtaaagagattgacttagttttccatcaattatttttcaattgacaaaactgtgataactcacaaaaacagctgaacataaacaacattttaatttgacttaagactatacatataatcagtgttgaaagaaataaattcctggaaacaatttgtaatctttcttgctaatccttagctgctcatcatggctgagtctaatctcgaaggcatctagacttgattaagatacctttactaatgcaccctaaatctgttattagcttgacatcagacacaggacttgaggacagcttagcagctcttgacagcagctggcaggaattatgtaatgtgagagtcttctggctttcagagaccactttcctcctccagggcagaaaactcagctgtttggccttggtttttgcgtctgtaaaatgggaggttgggggataggaactagattactaacttcccttcaaaattcatccatctaaagagacaactttgcactctgctcataaaaaagataaaaatctttccaacagggatttccaagaagtggcctcttggtagatatttcttgaaatattattccattcaataaatatctattcccacctgactgaagttcttcgaggacaacaattatatcttagtgatcactgtaactccagcacctagttcagtgctggccattgagtaggtgctcagtattttttaattaattaattttgagatgggggtctcagtagtttccccaggcttaatcttgaactcctggtctcagggaatcctcccacctcagcttcctgagtagctgggactacaggtgtgcatcaccacacctggctctaggtgctcagttaatacaaggtgcagaatctctgggaggcagggcaacacaatagtggtttgtaacgttccccaggtgattcccatatacagccaggcgaggcctgcccggcaactacatgcagagaggacccccgaggcctctttcctcagaaggtagctgtggtcatggagggcactcagggtggcaaggcctgctcctgaaaaagccgtgaaaacccagaggagatggaagagaagaggccaccaacaaaggatggccccaacagtgcttcccagtgcccaccctgcaaaaggggcttctgtttagtactaaggacatggagttcagagaggctgataactggcccccgaccacacccagccagcagctccagggtctctagtcctcacagtccctggcattgcatctgagagtaggggcagagctaatgccatcagtaggagtcacttttgtcccctaacttaggggagactgtcctgtccttacaaaggaatgtgtaagcacagctgatcaacatctgcataaggaaagatgtttctttatgcatttctggctccatcgagactcgtgactcaaccagtcctgtggctgccaaccagaagcagactcagcattcaaggaccattttccatacccctatatctgcatgcccaaccaatcagcagcacctctaccctaccctagaccctgcccaccaaactatctttgaaaaactaatcttcaagttttgggggagaccgatttgagtaataactatttcctgtgtgcccggccttgtgtcaattactctttctttactgcaatgccatggtctcagtggattggttttgtctgtgcagtaggcaggaagaacccatcaggtgattacagtacctgcacccccaacctgctttgggaagaatccagccaaaaaacttgaggcctgcagcctcagggtgagaacaagacaaaagggggatggagggagattgactcgctgtgtctcagctccagagcagcccccctgcagcctcccaagggtttatgcaaatcatcaaagggattccttgaggcaaaaggtttgagtctgcagttctgagacccccaaggatgtgaggagagacccaggcctatctcctttgggaggggccccaaacttgggggaagggatactggatgccaactgaaacccaaacataaaattctaagctcacccaaccatctgaatggactcctcctctccactcagcaaagggcattccaaagttaacctgaaaactagttcaggccatgatgggaaggggagcccagtcatgcctaattatacgatccctccttttggacttactgatagaacagactctttaagtctgaaaggaaacatttacagtctattctctctgaagcctgccacctggaggcttcacctgcgtgataaaaccttggtctccacaatctcttatcttaacccaaacattcctttctgttgattttaagtctttagacagtaatttaactctttccaccaattgccaatcagaaaatctttcgatctacttataacctggaagtcgtccacttccccaaccccattccagttgtccagcctttccagatcaaaccactgtacatgtcgcatatattattgatgtccgatgtctccctgaaacacataaaaccaagttgtggcctgatcaccttgggcacatgttctcaggatctgctgaaggctgtcatgggccattggtcatgcatagtaggctcaaaataaatcccttcaaatattttacagagtttgactcttttggttgacacaccaagctcaagcaggaagaaccgggctcaagaactgtctctctcctttctctctgttaggcatgggggggaagggagtgttgtgttaggcatgcggaggggaagggaacagggttgtgtgcagaggaaaatgcaaattcttaccttgtcagggtctctgacctgatggcgacccgtggtggagtcttcacagagacagataccactgcaagggcagacccagactgtgcaacccccaaagcaggtctcctcactcaccgggatagatagaactatcggccccaattcctcagccctacctgcaaccaccgcttgccatggtttccttgtgggtggagggtactttcccgccccctggtttcgggcttgcccacgtggcttgctctggccatggaatgaagcagaaacgaaagcctgccagttctgagcctacgccggaagacgccttgggcggttccgcggtccctgtgcgcttccaccttcacccagaaggacttctctggtgcagccgctgcttcttcagccacggcccaaaaggatcggagccccctggccgatccgcaggtctgcagggagccacagagcgcagcggccggcccagcgttcaagcccaagcacaggcctgcgagaaccttgttccagccaccgtttgggatggttgattaggacttgttgctgtggcggtagctcaccaatccaatgcgtgcacccgctcctttattaggctatagggccagtggctgcgacagggacctgatacaacagtgcgttaaataaggagcttattgagctatcatgtcgtaagccggtggagaagtccagggctagtgtgggggctccggcgggggctgtggcccccatccgcatggagcctccccacggttcacaggtctcggtcttcggagccttcagccccgtgagcccgaacagtccacacggcggcgccagaccctcttcccaacgccaccctctgaagcctccgctccaaccgtctccacttctgcttcaggctcaggattttcacttttctcgaatgggggtggccctcccctgatcttctgagtcgcaacagcatctccctccctccaggacctcagagccagagctgggcgagaggccctgacctccggggtagggtggcagcatccctgtgaaggtgcggtcctgcctcccatccccaggcgcccggcctctcccaccctcagcgccctgctcaccgccagctgaagatgccagggcacctctgcttcctccctgccctctctgcagtatcgcagagtgagcataaaagggcttaatataggcttcactggtcgtggtggctcgcgcctgtgaactcagtaacttgggaggccaaggccggaggatcacttgaggccaggagttcaaaaccagcctgggcaacaaggtgaggcctgtctctaaaaaaaaaaaaaaaaaaaaaaaagaaaagaaaagaataaaataggttcctttttctgggagattgatgtaggggagcgagcgtgtgtgagttggaagggaggcattgaggatcagccatttaaagcagcacacaaggatgttcaaggctagagatccacaggtgtattttcagaaactgaatttcctggctgggcgtggtggctcacacctgtaatcccagcactttgggaggccaaggcaggaggatcacttgaggtcaggagttcaagaccagcctggccaacatggtgaaatcttgtttctacaaaaaataaaaataaaaatcagctgggtgtggtggtgggtgcctgtaatccaagctacttgggaggctacggcaggagaatcacttgaacctggaaggtggaggttgagatcacactactgcactccagcctgggtgacagagtgagactgtctccagaaaaaatcccaaaacaaacaaacaaaacccctgaatttccttgtggacaccttttctctggcagcctttttgaatgagggctatgttttctccaatactatatggcctgcggaccgctcagctttcattccagtgaaaacattccagaacaaactccgggtcaatcccaggtgtttttccaatcaactcgggatgattgtgtgtcacctgccgcccagctagaatgacacctctccaggcctctgacttagctagatctccaccatgtgactccaccatagactccatgccttcttcttttgcaaaccctcggacacccaaacacctaccaatttcagccctttctgtgcaggtgccggagcccaggaagcacacatcaaggctcgcttgccagcagggtgctgccaataaaatgtagtcacatggaatttggaatgtggaaaggaggtagaagtcatcctttcttcccccgtagcagcaggcgtgcaggcctctggtgatcagctggactccatactcccccaccagtcaccagcctggggactgtggggctgcaaggacctcagcagcggtttcccaagttttctgacttcttccatcctctggaaatcagctgtggtaaagtagcctgaaagccagtggtgcaaccccctccccccaaccttcaccatctctagcccctccagtgataagcactaattgcctatatacaacccctatttgtttgaaatatctagagtaatttctgttttcctatctggggtagtgtaacataaaaagaaatataaatatatattggtctctgcccccagttcctaacacaaagctcctaaaacccttggaaattcctgaatgatggggatgctaggagcattgtcttcttttttttctaatttatcatttttctttttttccagatgttttttcctttttttttttttaaacttagggtatacatgtgcacatttaactttttttttttttttttttgagacggagtctcgctctgttgtccaggctggagtgcagtggcacaatctcggctcattgcaagctccacctcccgggttcacaccattctcctgcctcagcctcccaagtagctgggattacaggcgcccgccaccacacccggcaaattttttttgtatttttttagtagagatggagtttcaccatgttagtcaggatggtctcgatctcccgacctcatgatccacccgcctcggcctcccaaagtgctgggattacaggcatgagccactgcgcctggctttttttttttttttttaacttaggggatacatgtgcacttttttaaaacttaggggatacatgtgcacatttgttatataggtacacttgtgtcacaggggtttgttgtacagattatttcgtcacccaggtactaagcctagtacccagtagttttttctgctcctctctctcctcccaccctccatccttaggtaggccccagtgtctgttattcccttctttgtgatcattagttctcatcatttagctcccacttacgtgagaacatgctgtatgtggttttctgctgaggataatggcctccagctccatccatgttcctgcaaaagaccagtcattgtccgtattctaacaacagttagatatacctgttcagaggtgggaaatgatacagaaggatgtggtccctttaaatgacacggaaggggggaaggagagtgctgggtgggggtgtgtagtccctggctagggctctacccccaggcctgtgcccacggacctaagtgaggacaggcatttttgttttcctgcccaaatgttgcatttcccaagacctcccctggcctgccacgcccccatcctgtgcctataaaaaccctgagacacttgcaggcacacatacaaggacatggacaggagcagatcggcagaagaagacacaagcagctggacatcaagagggcgtggaggggagcacgccaggcaggccaccaaccggcagaacagcagaacgaggcagagtttggctgaggcagtgggaggacagcctgggctgctcagcagcccggctccaggggaaaaccttcccactccacccccttctggctttccccatctgctgagagctaccttcactcaataaaatcttgcactcattctccaagcccaggtgtgatccaattcttctggtacaccaaggcaagaacctgggatacagacagccctctgtcctggcgacaaggtagagggtctagttgagctagttaacataagccgcctatagacggcaaaactaaaagagcacacggtaacacatgcccactggggcttcaggagctgtaagcattcacccctagacactgccatggggttggagccccaaagcctgcctgtctgtatgctcccctcaaggtttgagcagcagggcactgaagaaccaagtcactctccctgtcccacgccctgcgaggggcccaaaggaacttttctcatttcaatatggtgtccaagaaagggtgacacatctcacagaaggcctaggctcaggagggctggagtgtgagacattccccctcccctgtgaacttaaaaatgtggccaacaattttttttaaaaatggctaccctgtagtgctttaactggacctatttagacaacgccttacatgctggagaaggacgatatactatgtgaatctaataagtctacaagacaatacttctctcttttggctgtctccttcctctccagggtgatgacaactccgtgagggttgtcttcatttcagcaacaaggaaataaattaatgatcccagaagcccccagtgtgcccctttccaatcatatccctctctctaaccgttataggtaaccactatcctgacttttgtaataatattcttgcttttaaaatgtagctctggccgggcacggtggctcacgcctgtaatcccagcactttgggaggccggggcgggtggatcacctgaggtcaggagtttgaggccagcctggccaacatggcgaaaacctgtctctactaaaaatacaaaaattacccaggtggtagtggcgtgtgcctgtaatcccagctactcagaggaggctgaggcaggagaatcggttaaaccttggagacagaggttgcagtgagctaagatagcaccatcgcactccagcctgggtgacagagtgagactctgtctcaaaataaataaataaaaataaataaaaaaataagataaataaatagttccggctgggcacggtggctcacacttgtaatcacagcactttgggaggccaaggcaggaggattgcttgagcccaggagttcaagaccagtctgagcaatacagcaggaccttgtctctagaaaaaatttaaaaattagctgggcatgttggtatgcacctgtagtcccagctactggagaggctgagatgggaggattgcttgagcatgggaggtccaggctgcagtgagccatgtttgcaccaccgcagaccctttctcaaaaataaataaaataaaatgtagttttacctattatatgtcagtcataaacaatatagtttagttttgccaccttgaacattatataacattatataaatgaaatcgtgttatacatattattttctgtatcacttctttcactcaataatttgtacatttaagatgtatgttgctgagcaatcacaagtaaaagagtggagaaggggcctaacagtaaaagagaatgaggagaaggaagagttgacaagcaaaggtgaaagcagaaagtcagttgtccctatggcttggggagataaaggtggcccaggaaggcctccaggaaaaggctgccatgtcaggcaggacacagaggacaattgaggaaaggtgattcttacaagatggtgaaggtgccattgtgggtgttgggctctggcacaggcacttggcggagcctctgctctgggttgagatcaatacatgacaacatctcatctccgcaggtacagagctcacatatgttggtgcttgtggaggccttctgttcctctggtgcagttaaagccttatcttggatgtaactttcagactgcaccaatgaatcctgagtaggttctagctcagtaggtggacctgtgacttcagtcagttttcgatgcagagtctgaagctgatctggatgaggagctgtagtcttccccagggctgtagaatgtccaatctctgtagtgggttctggagttatggcaagccctgggtctggaggctgagttgaggtctcctctgtggttggagacagtttaacctctgtagtaggttctgtagttatggtaagctccaggtccagaggttcaactgtgacttgagtcaggtttgaatgctgggtctgaacctggtctggatgtggaagtgtcaccttagggtgctttggaggaactaaagtcttcttcaggggtatagaatgtccaacctccgtagtgggttctggagtgatggtaagtcccagtccaaaggttgaactgtaatgctgggtgacattggatgctgagcttgatcctgacctggtgttggaactgttacctcttgatatactggaagttgtgctacaactttcttaggaggctgagttggggtctcctggacgactggagaaagttcaacctccgtagtggattctggagtgatggtaagtcccaggtccaaaggttgaactgtgatactgggcaatattgaatgctgagcttgatcctgaccttgtgttggaactgtcacctcataatgagctggaggttgagctgcaacctccttaggtggctctggaggctgagatgggaccatctgctggcttgaaggttctacctccttagggggctctggagtctgaactgtggcctcttgctgggttggagaaggttctgcctccatagggggctctggaatctgagctggaatctcctgctgagttagagatggttctacctcctgagggaactctggaggcaaagatggggccatctgctgggtcagagagggttctatcaccataggggggttctgaagactgagcagggactgcctgctggactggagaggattctacctctttaaggggctctaaaagctgagttggggcctgctataggactggagatggttcgaccttctcaggtggctctgatggctgagctggtatctcctgctgcagtggaggactgacctcttcagtggactttggaggatgacctgaggcttcctgctgggttgcagatggttcaacctccttagggggctctggtggctcagctggaaactcttgctggactggaaaaggttctacctccttaggggaatctgaagtctgagctgtggcctcctgctggactggagatttaaccttttcaggagaatgcagaggtggggaagggagatcaggctgggctagagaaaagtcagcctgctcagtgggaatagaagggttgtcctgctggactggagaaggttcaacttccatagtgacgctgcaggtatggtaagctccatatccacatttttaactgtggtattaggcaaagttgaattacttctgaatactgaagacagatctagaagtgaaaatatcatctcatcattcaatgaactttcaaagtctgaggagagctgagttggagactgagttgtgggctcttgatggactggagtaagttcatcattttcaggggtatttagctgctgaattataatctcttgctggtatttcaaatgttgaaactgctcaggagacattaagggctgagctggggccccttgttgggttaaaatttcaacctgattagtgatatctggagtcatggtaaccacgtgatccacaggtttaacagtggcattgtgcaatgttggaggctaaacttgatcatgacttagaggggaaactgttacctcatgatgctctggaggttgagctacaacttcattagggagctctggagtctgagctggggcctcctactggattagagaagactcaacctccttaggggtctatggacgctcagctgcagcctcctgctgggttggagaggggttctcattattaataggttctggagattgaactgaagtctcctgttgaactgttaaaggctcagcctcttccaatgactctggaggcagaggtgggcccccatgctgggtggcagaaatttctacatcattaattggccctgagagctgagctgtagcctcctggtggactggagaagttcccacctctgcactaggctctgttgctatggtgagctgcatgtctggaggcctaacagtgacattgggcaaatctgaatgctgagcttgatggtgacctggaggtaaaactgtgacttcatgatgttctggaggctgagctggggtctcctgctgggctggagaagattcaacctttccagaagactcagaaggctgagctggctgctgctgctcactgagggaaagttcaagctccataggaggacctggaggctcagttgcagcctcctgttgggttacagaagtttccacctcctctggaggctgaactggggcctcctgctgggcttgggaagattctgtcccattggtaggctctgaagttatggtaacctccacatccgcaggtttaactctaatgttgggtaagttataatgagcttgatcctcacctggaggttgaactgtcacctcatgattcagtagagtttgagctagactctccatagaggactctggagtctgagctggggcctcctgctggatctgagaaggttcaacccccccaggaaactcagaaggctgagccggctgctcctgctcactgggggaaggttcagcctccacaggagaacctagaggctcagctggggtctcttgctgggttgcaggaggttttgtctcctcagggcactctggtgtctgagctggggcctctaattgggttaaggaagagtccacctcctcggggtgccctggaggctgagctgcagcctgttcctggcttgacgtaagttccttacctggctctagagttactgcaagctccatatccacagatttgactgtgacattgggcgggcatgagtgctgagcttcactccaacttttcaatggaacatttacctcgtggtgtatcaatggcggagctacaaactcttcagaggcaggtcgctgctgtcctggggcctcctgctctgttgaagaagagtagaccccctgaagagactgtgaaggcagagctggggcctcctgatgggttagagaaggttcctcctcagagagctgtggaagctgcactggggcttgttgctgaagcgaagaggactggatgtcttcaagggtctctggattttgagtttcgggctctagatggaattgacaaagtccagcttgctcaggcagtcctggaggctcatctgagttcacccagagttctggaggcaggctgccgggatacagtatatccataattggatattcattctgctgaggttttttttttttttttttttttttaagacagagtctcgctctgtcgcccaggctggagtgcagtggcgcgatctcggttcattgcaacctctgcttcccaggttcacgccattctcctgcctcagcctcccaagtagctgggactacatgctcccgccaccacacccggctaattttttgtatttttagtggagacggggtttctccgtgttagccaggatggtctcgatctcctgaccttgtgatccgcccacctcggcctcccaaagtgctgggattacaggtgtgagtcaccgcgcccggcccattctgctaaggttttgatataaatcggtgtggagttccaacagccttagcaagcttccgatgctgagctagatctttcttcctgttcttgggcgaaacaataaacttggttgcttttgaatccttactgtctagaggtggaacaagtatttcatctgcctgatgatctgcagcctgatctagacctgcagtttgaaccttacttttgaggcgaggaggctgaactagggtctggttctgatcccagtccagcattggaaccgcctttgggagcctttcttgtcgaatcagcctgtcatttagatcctggtgtgcagcagagaactgctttggccccgggagcagctctccagctgaatccgtgtccaggaatggaaccaaatggggcggggctgacatctgcgaggtagcagaggaccccaggtaatcaaagcccctcgggtctgccgggggagtaagcgcatggggagattcccacgggagatgggaggagcgaggagcgggaagaccagggctcagtcggccgcaggggattagaggtcagctggagcgggtctttgatccactccagaggctgagcctactggactagtagccacaatagttgccacgtgaggaggggccgtgggccccagggacgctgctgggacatgacatgcgctggcgccgtgcactgagcgggagccattctggcagcctccagacgctcgtgcccctgacaaacacgcgccccgccccgtcgttaatgacacctttatttacgccacctttattaggttggggtccagatctgctccatgtcaccagggcgatcttaagtcacaatcccgcccaaggtccccttcccgccccgccccgctggaacacccctcccctccccttagtgaggaaggatttgggccgcagacctgggtggtctcaggactccagcggcctgttggggtgaagtggggtggggtcggggcgcggcacagcttcccaaggaagtcacaggacctcgcctcgggatattcagaagtgctagtccagttctggcagcctgaactcttcctcctccaaggtgaaatccgagaatactcttccttccagggagagcgactgacctgcaaaatgggtgccagttagggtggcagggaggacgcacattacaatcatttattccaaaatgttgccattttcgctaaactttcggtatcttttgttgcatgtttgataattaattcaccaccctgttaggtaggggctgccagggaatgagcgaggactccagattttctgtaggaggggtgttgggggtaggcaagtcggtctgggagagaaggttttaatccgagtgaagagccctttgcactagcctgggaggaggctgaactgtcatcctgccttgactcaacacagccattcccctagaagttacagtgtcacccttcagagatctaccccgtgtgcacacatagagaagaggcttaggttgttagagtcagcatgttaaatcatttcctgaaatgcgactgtaactagaacccagctgacttcccccacagccattcttacctattttattactgtctggcataattaccagcatgtaaactccaagaaggtgcttcatcttcttccagtgcctagcataggcatagggtgcatagtgatggctttaaagtggaagggattccaaggttcgcctcatttagggatggagctattgttataatcagttttctgaaatcattgctgacttcctctcacatttcacaggaagctagacttcttaaagcttaaggtttccttggtgggttttatttaaattgaattaaaatatttattttacagggaaaaacttcaaaacaaaacactttgcaactttgtggtgaaagttaaataaaacactctagctccaaattaagttcccactgaaatgaaacacttctgctccttttttaaaaaaaaaaaattcatatgtagtaaataatgactgttttcttttagagattaatttagaaagttaatccctatttaaggctttcatatacagtcatgcattgcttgtcacgtgaggagtctgagaaaggtgtcattaagtgatttcaccattgtgctaacatcatagcatatatttacacaaacctaggtggtatagcctatagcacacctaggctatggtatggcctatgactcctaggctataaacctgtactgcatgttactgttgttaggttttgaagaaaaagcaagggttaaagaaagacacacagaaagagggcagctcaacagcaaatgcaggttttatgtccagcataaaccctacagaagtgggagaccagcctcatgccagagcccaccactgcttacaggctagggcaatttataggtatggtggggaggggtctgggcagtagggcttgctgcctggcaggatattgatgagatgttcccatgatgaggtgcttctggcccttgttccagcgggatgtcatcatggtgttccttggacctttgtccagcaagatatgacaaggatgtttctttttcttttctttcttttttgttttctttttcttttttcttttttttttttttttagatggagtctcactctcttgcccaggctggagtgcagtggcgtgatctcggctcactgcaacctctgcctcctgggttcaagcaattctcctacctcagcctcctgagtagctgggattacaggtgtgcaccaccatacccagctaatttttgtgttttcagtagagacaggttttcaccatgttagccaggctgctgatctcgaactcctgacctcaagtgatctgcccgcctcagcttcccacaatgctgggattacaggtgtgagccattgcaccaggccagggatgtttctttcgttgggcctttgtccgccctgtggtcaggtggttaggtaggatgtttctcatggcctgaacccctgtgaaatgtttcgctttgaccaaggtctgcaaaatagcaaggaacttgtaacatggtgcagtttggctaacattcttgccttttactttaatataaaaggaagaggggtgttgtgttgttgattgtctggctacttccttccgaataggggtgctgtactcggcgtgtgggttttgaagcagtgggcgttcgacttcagagttgttttccttgaggcgctgataccggccttggcggaggagaatgacggtattcatgtgtttctgggtggttgcctgaacaagggagttcagcctttgggagataaagcaggatatgaaggtgagtacacatgggccaattgttagtattaggaggcagaaaattaggggtcctccaactggctatcccggtgccgagtgtagcagagatatttagtcctgctaacgggaatgaaatgtacagcccgcttggtgtgtggggtggggagaggaaacaggcattactaaaggaacctgaacctgaatagtttgttaggcaaaatgttattgtttggagattgaaacaccagggtgcatattcctgatcaattggccagtaggcagaaataagattttgcaccacaaaggaagaagatcacaggtgcatgccaccacgcccagctaatttttatatttttttgtagaggtgaggttccctgggcccaagtgcagcctagggaattctggcactctccagatgtcagaggtcataatcaaggatgacgcctttagttaggcaaaccaacttagagcctccactccataccataggggagtcccagacaagaacacagcttgggctgggcgtggtggctcactcctgtaatcccaacactctgggaagctgaggtgggtggacacttgaggtcaggagttcgagaccagtctggccaacatggtgaaaccccgtgtctactaaaaatacaaatattagccaggcgtggtggcccgtgcctgtagtcccagctactcaggaggctgaggcaggagaattgcttgaacctgagaggcggaggttacagtgagcagagatcatgccactgcactctagcctgggcaacacagtgaggctctgtctcaaaaaaaagtagtaaaaataataatgtgttatatatcatatcatatgacatataatgtagctatgatgatacaataataatagccgttattcttaaaatggcatatgaggcaggtcttgaaggatatgcagcttcattggccaaaatttccatcactccctgcttgctctctcctctgtcaatcagctgctaccagggaggtccagtttctgaaacactggaatcgtgtgagcagaagtcgccactcacaccagcccttggtgtgaggaggaggacatttgagggcaaggtagctgcagcccccaagctgccctccacactggaagccagtcaaggcgtggcctcctcagctggagttgacatccagttctgctctggacctgcaaagtctctgagggcttcctgccaggctgcagggaggggtttgggtgtagacctggtggactgtaaaattacccatttgccccagattaatgattaacgggtccctgccctcaccctgtctgggagaggagcccagggtcaggctaggccaaggggagcccgatagcatctgtctctgctcagaggtttcagagatatgctccatgatggtttgactgcacctgatgggtgtggaatctacgggtgatttctgaggccacctggggcctggccaggccgcataccctctggtgaggcttccaacttctggggcatacagagaggatgtggcatccagtcagaagccctggttaaggcaagtggctccaaacaggagagctgtcccttggctcagaggaatgtgggcttctctgactactcctggcttgaccacaggacttaccctggccagtggcacatgagcaacatgataagtgccacatctaagcaggatgtggcactttaagagctactgcagccgggcgcggtagctcacacctgtaatcccagcaatttgggaggccaaggcaggcagatcacaaggtcaggagattgagaccatcctggccaacatggtgaaaccccatctctactaaaaatacaaaaattagccaggcgtggtggtggtgcatgcctgtagtcccagctacttgggaggctgagggaggagaatcgcttgaacccgggaggcggaggttgcagcctggcgacagagcaagactacgtttcaaacaaacaaacaaataaacaagcaaacaaacaaaaaaggagccattgcctggttctacttttgcttttcttttctttttttcttttttttctttttcttttttgagacagggtctcactcggttgcttaggttggagttcagtgacgtgatctcttctcactgcagcctccacctcctgagctcaaactatcctcctgcctcagcctcccaagtagctgggactacaggcttgtgccaccatgcctggctaattttcatacttttagtagagatggggtttcgctatgtcatctaggctggtctcaaactcctggactcaagcaatccgcctgccttggcctcccaaagtggtgggattacaggtgtgagccaccgcacctcgcccacctttgctcttttaccctggctaggagcccaggatgtcccagaacggggttacttcttttggggtgagccctgaaatgatgtatattccacccacactgggggcacccaaggaggctcccttcccttcacctgcccctcaccaccatccccaaggctcacccgtctctgtcctctcgccgtctccagcctgaccaggtgggaggtcctgatgcccttcccaggactgggcactgcggtggccccagcacagggcagggcccacctgaagcagtgtgacctgctgaagttgtcccggcagcagaagcagctctgcgggagggagcccagcctggctgagaccctgtgggacgccatgcacctcggcctggagtgccagttccagttccggcatgagcgctggaactacagcttggagggtaggaggggcctgctcaagtgaggtggggaggagggctatgggaggaggagggctgggggcgcgggggaagaaggcttctgggaggaggaggaggctgggagaggctgccttttcctctcccctggaccctgtgcccagaacacactgcccttgctaccctagcacggttccatatgagaagagtcccgggattaatgaggggcagttgaagaccaggtgtggcccagcctcaggtttcggggagcagaggagcaaggaagatccaagagaagaggagacacaagtccggtcctggaggagcccacagatgagaggggggtcccctagttaccttcctctgcctcttcacacacacatgcgaaacaaggcacatgaagacatgaggacaggcagcagcgggttccaggacccatgacatgagccaggccatgcatttgttcactcctttagctgtccctttgttcatcacatccattgatccatcagtccctccctcccttccactcccattctacctccctcccttcttcctgcctccctcccacctccacccacccactaagcatccatggaggcccacagtaagccaggcactgtgctagatgctggaggttcagagctgaacaagaccccagctgcccttgggaagcatgcagtctagaagggagaacacaggtcaccatgtgactccctcaccaaggggaaagggctttgatgggacatttttttaaaaaatgcagtgatgctgtacagggcagccaggcctctcctaggccagctgctctccactgtcagcagtcaagctgatggcctctctcaggacatcactagcacccagatgcactgagggcaggtaggaagtagtgagccggtgggaggacagctttgggccacacccagcagaaaggagtagcggtggtcccggagtgggtgggatggtcagtctggggcaagtcagccaggagactcaaggtcactctatcattgggtctattccacagtgggtagcagagaatgatatttgagaaccatcatgcatcacaggaagcccccggcgcttatctcagcggcctcagaaataggccgatccaaatggtcacacactgacttggagtcaaaatggcgggtttagccccagctgtggtggcaccaggtatctgcgtagcttctctttgcatctcagtgttcttctctgagaagtggaggccatagcccctggcctgctgccctctgggaatttgggcatgtcctccacagtgaatttggaagttccatttaagtgggaactcgcagtcagagtttaaggggcagttgacagggagacccacccggagttgtgtcctcaagccacattccctcatcctgcccattgcagggctaccactaccgcctcctgccctcagagagcagcaggcagcgtctgagcttcttcctttcctctcttccccctttcctccctccccatacccttctacagttcctggaatgagtaagagagtctggaagagcaaggggctgagagccttcagtgcctgcagaaaagcctgggtttgtaagggcagccaaggctgcaaagggacacatggtttgagctcttgagctcttcaacactgggctgtgacaaatggggataaggaatagcctgtttgctggtatttagggtacactggtccccagatatctcctcccacctgtactatggaaatttatcatgggaatttcatttctttttctagagattcttggctgcgtagaaatgcggtcctggtctcacttggctactgagccatcccataaacttcagtgatattgacattgacattgaatttctcacccccactgagagcagggttggtttgtatgtttgtttgttgttgttttgagacagggtcttgctctgtcacccaggctggagtgcagtggtgtgatcctggctcactgcagcctcaatttcccaggctcatgcaatcctcccacctcagcctccccagtacctgggaccacaggcacatgccaccacacctggcttttaaaattttttttgtagagacaaggtctcagtatgttgcccagtctactctcaaactcttgggttcaagtgatcctctcacctcagcctcccagagtgctgggattacaggcatgagccaccatgcctggccgagggcaagttttaataaggagaagaggccagaagatgagacactttcgggagaagtggagatgggagaaaggggttcttttaaggccgggtgtggtggctcacgcctgtaatcccagcactttgggaggccaaggtgggtggatcacgaggtcaggagttcaagaccagcctggccaagatggtgaaaccccatctctactaaaaatacaaaaattagtacggcacggtggcaagcacttgtaatcccagctactcaggaggccgaggcaggagaatcgcttgaacctgggtggcagaggctgcagtgagccgagatcatgccactgcactccagtatgagcgatagggtgagactccatctcaaaaaaaaaaaggttggggggggttcttctatgagtggaggggctctcacgcctgttaatcacctagcatgtgccaggagctgcccagaggctgagttacatcacccaactccatcttcacgacagtcctatgccaggatttaaccagctccatttcacagatgaggatgtggaggctcaggggagataatgtcccctaatcaaggtcacacagccaggagggagtgaagtcaggattcctacccagaagcccctgctcttcctactgtgccccttctggggttggtgtgggcatgaagaattggtgcacattttacaaccttgccccataaaagcagcaatattgaggaggtagaggggacctgacaggccacacagctgaggctctgtggcctgaggcagccaaggcctaagtccatcatccaagcagccaagacccaccaccctccagaaggctcagcaggtcatgcctcaggggctccaaaatggccaggcaggctgagaaaatctccaggttgtgcagcggggcctgcaatcctgaaaccagaaactgcaactccaccccctccccatggcagcgggcctagggggagggaataggggtgctgggatcccaaagtaaccctgcaggagaaggaggcagaggcaccttggatctagccagatggggaggggcatctggtctcagcataacccccttccaaaccctgacagtaacccctgggaaaagcacagccccctctcaagcccagagccagtttctccctaggatctgtgtacttggagcaaaaagttacccgacaccccacgcctccctgcctctgctacccacacttctgggcccccggcagggactgtgacctggtcagaacagctggtagcccatgtgcttccacccccaccttctctccgttccggactttcaggtcacgacacagggaggaaaagaaggctatgctgggagtggagcctcagagggaaagggggcagggatgcttaggaatataaagggcctcaggtcctggccagagacactctgctgagctcctctgcacctgcccagcaccatggtgatgtctggtggccaagtctgggcccccatcagctgtattctctaagagcttggggatgggggctggcaccaagggcccctcctcaggcccactaagggcatgaaggagttaggccagggcagcctcgtctgccattctgatggccaggatagctactagggcttcttattcctgcttggggtggtggggatgaggagagttcctggttaaaagagggttgaggggcctaggagctctgggagtgtgcatcatgtttacgggcatcatagtctgtgaatcattgtgtgttgcaggcacaaaattctctgtgcattgggtgtgtgaatcctcaggctggctttcctgtgtgtaactgttagtcattcatttaatatgtattactgagtatctgctaagtgccaggcaccattctaggtgcttgtgatccatcaatagacaaaataggcgaagagcccagctgtaattaatgatgcttacattgagggaggatatgccgctgggaagggactcagacaacaaatataagtatagaatatagtaagttagaaagtgcaggccaggtgtggcggctcatacctgtaatctcagaactttgggaggtgaggcgggaggatctcatgaggccaggagtttgagaccagcctgggctacatagcaagactccatctctacaaaaaattaaaatttagttgggcatgattgtatgcacctgtagacctagctacttgggaggctgaagcaaaaggatggcctgagcccaggagtttgaggctgtagtgagctatgatcccgacactacattccagcctggaaggcaaaagaaggccttgccttaaaacaataaaataaaataaaaagaaagaaaagaaaaaatagggcaaaaatagagcaagaaaaagagcaagatgaggggtttggttgcaatattattttatttatttatttttttaaatcgtagagacggggctctctgtcttttgcccaagctagtcttgaactcatgggctcaagcagtcctcccacctcggcctcccaaagtgctgggattacaggcgtgagccaccgcgcccggccaggttgcaattataaataggggtgtcagggtaggatccatttaaaaggtggattttgagctaatgcttacaaggggagacagagctggccatgaggatgtctggaggaagagtcttccaggcagagaacagagtgaccgtcattttgcgggaacagcagggagaaaggagggggataagcaaggagtttgcgggagagagggcagtgaggttagggagctgaccaatggctttatgccgtcctcatgcgtccaccttagggtgtgtctcctcgttcgtttttttttttttttttttctttttcttttttttttttttctttttttgagacgaagtctggctctgttgggcagggtggagtacagtggcgcaatctcggctcactaaaacctccacctcccgggttccagcaattatcctgcctcagcccccagagtagctgggattacaggcgcccaccaccacgcccggctaatttttgtatttttagtagagacggggtttcgccatgttggccaggctgatcttgaacgcctgacctcaggttatccgcccgcctcggcttcccaaagtgctgggattacaggcgtgagccaccgcgcctcgatgctctgcctgcatcaccgggcatgtccaggtgtgtaccattcctccgagcaccaggatgtcccttaaggcgtccgtgctctggtgtgtgtcccagaaatagacacgaccctcggtctgagcgcccctgcaccccagcctgcccaccgcgcggaacacctgcaagctccggtccgggtgccgcgctgaccacagccccggcatcacgtgacctcccgcggctctgtctgccccgccccctccagacgcctgctctgcgctgcgcattcgctctggccatagcgggcctcgtgtcgctgctgatgcagcccgagggcgccctcggcgaggagctgcaagtgccgcagcccagggccgccagttggctgaacttaggctccatcaagaagtacttggggaagctcttcaacagcaggtgggccggcggagggtgtgaggaagggagggagggagggaggaaagcggggggtggggggggcgcgggggggggacacggacgccaccaggcacccccacgcacatcgcggcctgagctgggctcggggagcggcctcatgactgcaaagacttgttcccagcccgaagaaatctaaaaaccacaagaaaactgcgaacgccacggacacctccccatcaaaagccacgaaacccccaccatggaccaccacgaacccccagtggctgaacacctcggaaccccgaccaccgacctcctcccggggccccaggtaggacagcctggatgctgggcaccgagccaggggcctcggggctgggggcagcttgggtgctagcgagaggaagttcctgggggcgggcatgcggggagacacagcacccctgtggggggggcttctttctccaggctgggccttggcctccagacgcctctctgcccaccaacccctttgtattgagaggggcctcgacccctcctcatcccctcagtgaaaacaataaagacaaatttttgttgcttcagtgacttctgtgggcctgcgggcagggagggaccagtccatggaacgggaagtgggaccctgtagtttctgctgtgagagaaaaagacctcagctgttgggggtcctcccctgcctcccctggcaacccatccaccttcccccactccacccacacatggccttgtgggtctggccctccaccccgtggtagagacacagatacgggtcctggagaagacacttattgcccctgtagtcctgcacagacagcaccagtgtggggggctctaacccagagggagagcagaggtgagagaagaaacctcaaagaaggggcttcagctagacacaccccaactcccacctggctcaagtttctaccaaacagcccagactcctctccccattcaccgcgcatccccttaagctgccagagaaaatgctgggacttcaggctccctctcccagactcaaaccgttcttttgcgaaaccatctctctatccagacatctttggatttaagaatcaacctgaggctgggcacagtggctcacacctgtaatcccagcattttgggaggccgaggtgagcagatcgctggagcccaggagtttaagaccatgctgggcaacatagcaagaccctgtctctaaaaaataaaaaaatttgctgggtgtggtggcatgtgcctgtagttccagctgtttgggaggctgaggcaggaggatcgcttgagcccaggaggtcaaagctatggtgagctgtgatcatgccactgtactccagcctgggtgacagagcaagatcctgtctccaaaaacaaacaaaaaatcaatctgagccaagcagctgcatcctctagaagctctttgccttttaggacctgtttctacttccaggtcatttgcacacaccagatggagtaggacttgaggggaaacacaattgtgtgtcatttccatttctgtgcaaggtgctgagcccaggaaagtggacccctcatcctccaaacccataaccccatcccttgagaccaagcatgtgggggaggcaggagaagcctttctaggaaccagaaacattctagttccctcacttctcccctttacacatgcgcgtacacacgcatgcacacgcgcactgtccccacctattcagggtgcctgagaagggccaggaaaagatgggttctctgggaatctgggaagtcctccctggggcaggatccaggtccttgtcctcccagggctggagtgtacaatctacagattcaactcatggtggctggaactctcagctaatctagcctcctccccttccacagcagcttgaatacctcctgtgcccaggacttcactacctctcagggcagcccattctctccaaatttctggacggcagctcaggcccctggatgcagccatgactgccatagcaccagaatcgttcttccaggctgggctgtgcccctgcccccatgccaagggtgctttcgtataaattttggtgcttctgctgcctaggctgcagtaaggcactggtgaggggtgcacttggggaagggttgtcatcaggctgtgtcgggaaggtctatgggtactgaactgggaagattcaagactgccacttcacagacttgctgaaggaccatctgctcagaggagtccctgccttcctctggccaccacttttccctctgcgaaggggagaggatgagttgagtgactctgatgacccccgccaacgttctggatgatccccttttcctctgccctgccctgccctcccctttctctcccatgcatttggcacttcctgctgcccccaccaggggtccacagagacacaggacaggctgtggctttgacttgctttattgagcctgtgtgggagcagggagcaagctttggccagagccaagggtgcagaggggagagctgggctggcgctgctcatggagtcgtaggagacagaaggtggcattataagtccagcgggctgagctccctgtgaggacagggcagaacatggcagtgtagggggtaggcctcgtgccctcaggaggcctcaggctggccctgggctcctgttctccctcttccaccccccactacacctttccaagccctgattcagtcccaccacccccatttcagctccagggagctggacagacagggcagggagtcaaactcacctggggacagcagcatgcggggacccccactccgagaaggccagcgtgtcctctttgtgtcttttcccatacctgggagggaagaggcagcaggggcaagcactgtgcccaggtgccagcccacctgtttcatatctgcctgtaggcaccatcttgcccagggcacattggtctaggcctgttgagcacagatgccctgttttcccaagagcaggcctggaaggggctggggctggggctggggatagggtgtggccaggaatgtggagtgggcccagggtcccaggggctgggatctctctccccaactgtggcacacacctaggcctggtcagcatgttgatgtatctacggagatcagctgcatactgggccatctgctctggtgtggcattgtcccctgggtacactggctccagtggggctccctgggcacccagcagtggctgtagtaacagagccacgcaggtggacaggagcagcagggagaggcagaggcgtgcggcagccatctgaggagcaagcagaggggaggtggagagcccgggctgcagattttcccgtgcccaggaagcagggcccaactatccagccccttagcccatcatccatttctccaagcctggggacaagggggcagagcaaagggccactccaagctggccactccacctcctagacactgctctgaaggcacggacagcctgtcctgtgagcagcccagcaagccagggcctcgcaagttagaaaagtatagcagagaaaatggggatgtgagtcctggagacacgggactcatgacatccagggcctcatggctcccaggaggcagcagctagtgggaataagggcatgccaggtcacccacagggtgggggacacagaatgaactcgggaagccaaggacagaaatccatggccttgtgggtctggccctccaccctgcgatagagacacagatatcggtcctggagaagacgctactgtccatgtcgtcctgcacagaccagcaaaggcactcacacagggaccccagtcactcacaaggtcacagtcacacattccagttcacagccatgcacacgagtgtgcacacacacgtgcagtcagcagacggctcttctagcgtgacaggtctgtccagatgcagaaagcaagacccaagcaggaccttaggcctcccaaggcccctggccctgcaaagcaccacctcctctccatcccaggccccagcctgggggaggcccccagagccccaggcaggctgagcccacttacccggagtccagagtaaatgggcactagaccaagcgagcacctgcctcaggccggatgggcccctgccctcggctgggccgctttatagtcctcagccccccagagtccccgcctcctgtcagcctctctcactccgaagccctcacccctcctctcactgtctcctcatactggcaacgccagtactgaggccagagacgggagggggacagggcagttctgtgggtgccagaccagcagcataacagataaaactggaccacagtaaaagtctcctgtgggcccccatcactgacaccccttccctttgggcaccagagcaggcttggttcaagaaagatggggttctgggactcgagagtgactgaaaggttttggtcacaggccttggaactagctctcctgcctcccaaagatcaacccaaatcatccaacggattctcttggggcagaagattgaggctgcagctggaagactgaggctacagccagagcctccaggctgaagaatggaaactcaggccatcctctgcagcttgcaactagaacaaggtgggaagagggaaggggcctcaggtcctcaggcaaggtggaaaggagtggggtgccaggcttggagaaacccatttggtgggtgcataggatgcagaatgagaactcatgtgcctgggttcaggggaaatgttgaggggggtgccggtttccagtatccatttccctccccatctcagagcccccattccagggaagtgctaaaaaccagcttcatttgtaaagcctcacattttccaaagtgctgccagctcagtcacctcactaaatccccacaacaacccattttacagattcaggatctgaaatctgctcagagatgtcaaatcactggccccaaaccccacagccagtcagaccccaaaatttaactccaaacctggactgttttttttcctaagtggggccgtcaaagtattgttataatttcccactttttggctgagaaacctgaggctcacagaggtaaagacgcttgctcaagatctcatagctaccgaggttccgaattctggcttagattctcaaccccactaatccatccccaccagaagcccctgagtctcccctgcccagcgtctcttcccaacccccagtctccctcccctgcttaggccaaggagtggtaactggctgtgtctgaatgacacggtgacaccaagtacggagctaaggacttatgactgctgacgttctgctgtcccagatcagtataccaagaagttgggagatgggggggactgttggggaagaggggactggaggtgaaactccagggatctggcagggtgggcttagagtcagacagacctgggtccaaatcctggctctgcattggctggctctgtgagcctgggaaagtaatttctttagcctctctgagcttcacttttcctctcagtaaaataggctcatcacacccatctgaagatagggagaataaaggaaggctcagcaaacatcagtgttctgccttgaccctctcaattttgattttggttaacaagaagagcaataatgcttcaccagacaacttacattccacaaagcaaatacgaaagtcattctgtctcagcaagcccgggcctttctctggactgaggttttccacttgcaaaacaagggtgtgaattggtggctggtctcagcctggccttgggtttggcgggtagaggttgcagctcgccgccagagggcgccaggctccaaccctagttaaaaggatctgagctcccacaggaccatggccttggagggacctgttctggctgctactcatgtggggacccagccccacccaacagacaatggatctagggattgactcagatgccagggccacttacagttctatcctgtcgcagaggtaaacctaagtgcctaagaaataacaggcactccacaaatgtcaaccaaaccgtagctttcatttttctcctttgcaaacaacagattcctcttctgggtcctctcagggatgtggtgacaatccaggaggaagtggtagtagatgtgctttctacactgcatggccatgtgtattagttccttctcatactgctttgaaaagaactgcccgaggccaggcgcagtggctcacgcctgtaatcccagcactttgggaggctgaggcaggcggatcacctgaggtcaggagttcaagaccagcctggccaacatggtgaaaccccatcactactaaaaatacaaaaattagccgggcgtggtagcgcatgcctgtaatcccagctacttgggaggctgaggcaggagaatcacttgaaccagggaggcagaggttgcagtgaaccgagatcgtgccgctacactccagcctgggctgtaacagagtgagacaccatctcaaaaaacacacaaaaaacaaaaagaactacctgaaattgggtcatttataaaggaaagaggtttaattgactcacagttcagcatggctggggaggcctcaggaaacttaaaatcatggtggaaggcgtaggggaaacaaggcacctttctcacaaggcggcaggaaggagaagtgctgatcaaaggggagaagagcaacttataaaatcatcagctctcgtgatgactcactcactatcacgagaacagcatggggaaaactgcccccatgattcaatgacctccacctggtctctcccttcgcatgaggactacggggattacaattcaagatgagatttggtggggatgcaaagcctaactacatcactatgtctagaacacagcaatggttctcactcatcttgatgtgttcctgtcagaggcgtttgaaccacagcgactccatcttgaacaagggctgggtaaaatgaggctgcaacctgctgggctgcattcccaggaggttagacatttttagtcacaggacaagataggaggccggcacaagatacgggtcacaagaccctgctgatagaatgagataaagaagctggtaagaacacgcaaaaaccaagagggtgatgagcatgaccgctgattgccctcactgatttttctttttttctttttcagcagagatgaggtttcaccatgttggcaaggctggtctcaaactcctgacctcaaatgatctgcccccatcggcttcccaaagtgctgggattacaggcatgagtcaccgtgcctggcctcgctgatcattatacactaattataatgcattagcatgctaagagatgctcccaccagcatcagacagtttacaaatgccatggcaacatctggaagttaccctccatggtctaaaaggaggaggaaccctcagttctgggaaatccccaccccttttctggaaaactcatgaataatccaccccttgtttattagtatatgatcaagacataaccataaaaatagccaaacggcagccctgggggctgctctgcctatggagtagccataggcttttatttattgattgattttgtagcgatggaggctcacttttttgcccaagctcaaacaatcctcctgccttggcctcccaaaatgctgagattacaggcatgagctaccgcacctggcccttgtttccttacttatctaataaacttactttcactctactctgcggaatcaccctgaattctttcttgcatgagccccaagaaccctcttttggggtctgggtcaggacctgttttcagtaacattcccacagtgcttgccacagagccctgcttaaagaaagcaccagttcctggcctgcagacccactaaatgaagatgatagtggtacctcttcccctgcccaacaccacgccctctggcacaaggtggatggccactggcagtgatggggatggagtaagtgctatgagactaggagaggaacaccccaggaacacctgaggtcacagagtgaatgaaggcaggtaaaggagcaaagggaatgggggcccccacatacgtgaccccagggcagcagcttggcctgcaccaagtcctccatcacacacactcccccgccccacccccgcatcctggctgtctaaccacaatccctgctgccttcagttaatcaaccaatgagtggtcattcattgcacatctgttctgggcctcatgggggcagcgggaggtgatgaagaagcaagggttctacaaagaggtcaaagctacgtgaggagccggggaatggcttgcttttttttttttttttttttttttttagacgggctctcactctgtcacccaggctggagtgcagtggcatgatcattgctcactacagcgatgtttcatgggctcaagggatcctgccatctcagcttcccaaggagctgggaccaaaagtgtgtgccaccatggcctgctattttttttttttatttcttggagagatgggctcaagcatctacacacctcagcctcctaaagtgctgggattatagctgtgagccgttgcacctggccaggatggctttttttgaaagtgaggacacgaaagttcagaaaggggaagaaactggctgtggtcctgcagcaagctggcagccgtccctcacctagccctgcgcttcagaaccttactcacagatcatcttacaaatgcctctttgctactttgtgagggaggcaggaattactcttcacccttatcagatgagaaaaccaaggcccagtgaggtagctgaggctgtctaaggttacatgggagtcaggaagggtcaagactaaacccaggtccacgtggttccagcctggcttcatccctgtttgcagaccccccaatcccaacccgccactggccagagcctggcccagctcttaggccaatgtcttattccaaaattaaatggcagcagcagaggaagggatagattggggggtagctgcccccagatgccaggacctatgccctggagaaacccttgggctggggatagctgtgacatgtacacacataccttgggccccttgtctcacccactctgagccaactcaggacccagtgggggctcactccactaatttggagcctgggctctgcctccacttctctctgccctgggaactccatctgcctccagggcctcctgaagacacgcaggggagagttcagtatttctcccttcctgtctccagtgtctgcaacagcaaatcctatcattgccgctccaaatttttctcaaagaggaagccttctttcttgctgaaatagaaactaaaccaagctacataatacagtttgagaacagcctggccaacgtgatgaaaccccatctgtactgaaaatacaaaaaattagccgggcatggtggtaggtgcctgtaatcccagctacttgggagactgaggcaggagaattgcttgaacctgggaggcagatgttgcagtgagccgagatggcaccattgcactccagcctgggtgacaagagcaagactccgtgtcaaaaaaaaaaaacagtgttggggaggtaaacagagagggcagggcaggaagattcctggaggaaatgaggcctgaagtggcattgaaggctgggggcaggggaaatgctgtttcacagaagcagggctctgtggcagtgggactgagcactttaggggcgcacactgagaaactgcaggaaatgccaccaaaggaggaaggggtgttatgaaaagcctgagtttctggcagagagtttagatttcacgtttagtagaatcagaactgcttcagggtgagatatcttacctctgcccctcactctatggcctcctgcaagcctctctccctgtccgccttgggattctcattgcttcaatgaagagataggcccagatgatttctagatgatattcaaaggacatcacgttcctagcagataacgttaggtgcccaaatatccacattctcctttcatcatcaaagactttgagatggtacatatgtaggtttgttatataataaaaagataatctggctgggagcggtggctcacacctgtaattccagcactttgggaggccgaagcgggtggatcacctgaggtcaggagttcaagaccagcctgcccaacacggtgaaatcctgtctctactaaaaatacaaaattagctgggccgtggtggtgtgcgcctgtaatccagcctcctcgggaggctgaggcaggagaatcacttgaacccaggagggggaggttgcagtgagccgagattgtgccattacactccagcctgggcaacaagagcaaaactctgtctcaaaaaaaaaaaaaatccatttataaatttaaaaaaattttaaaaacaaagagcttaagatgagcacacagccactcagctaaacacatctcataggttgtctttgcaactaagtggggccatgagaccaggctttagccaatgggctgagagttaaagtgatttttgccattccgtttttaggaatggatgtgcctgcctatggcagattatatttttcaaagatgacaaaaaaaatctcctatctcatgtgtaattctacagtggggtctgtgtcccctcttcttgaatgtgaatgcacttgtgactgctttgaccaacagaatatgggatatgatgccttatctcctgaggctgggtcacaaaaatgattgtcatgagttaaattgtgccccccctgaaattcatatgttctaattcataagtcctaactcccagtacttcagagtgtgaccttatttagaaatggggtctttgcagatgtaattagttaaaatgaggttgccaggcgcggtggctcacgcctgaaatcccagcactttgggaggccaaggcgggtggatcacaaggtcaggagtttgagatcaccctggccaacatagtgaaaccccatctgtactaaaaatacaaaaattagccgggtgtggtggcgcgtgcctgtagtctcagctactccagagcctgaggcaggagaatcgcttgaacccgcgaggcggaggttgtcgtgagcctagatcatgccactgcactccagcctgggcgacagagcgagactccatctcaaaaaaaaaaaaaaaatgatgaggtcatactacagtgtgtgaacccctaatcctataggactgttcgcctttgaaaaggggaaatttagacacagaaacagccatgcaaagagggaagatgatgtgaagaggcacagctcagacacccatcttcaaggcaaggagagaggcctggaacagatcagaaggaatcaacctgccaactccttcatttcagactgctagccacaggaactgttgtttaaaccacccagtctgtgattctttgttatggcagccctagcaaactaaccagcaatgccatcttcatctgattctctttaaatactccaagcaggagaccagttaccatttaagtccaactaccccaagaatatcagactggggaggccacatgtaggtacaatggtcaacagccccggctgaactcaacagccagcactagcatgcgaatgagccttctcaggcatcagcccagtggatccttaaccacaaccctgccaacctctgatagtatccgcatgtgagactcaaagcaagaactgccagggggagcacttcctgatcctgacccacaaaatcctgagtgatgtacaatggttgcttgaagctgccaagttttagggtaacttattatacaacatagtaaccagagtgcttaccttccccttccctcccttgccactggccggaacacagatgaggccatggtgggctgtcttcagtcctgtaaatgacatagatgagggcatggggaagccacaaacgaggagcctgggctcttggatgccctcatggagcacaactgccaactccccacgtgccactcacatttcatgcaagagaaataaatttccatcttgtttaagccactgttaattccacctgttttttttttaagccaaatcaatatcctagtaatatgatatatgtaaaacaaacagctcagtgtctcgcacataaataagtgctttttggaaaaaataattattgctattgtcattattattatactaataataattattaataatgttattaccctaaactgctcaacactcctcaaaatgaacatgaggtggacccatgtcactgatggtcaatgagacatgtcaagctgggcagaaattgtctgtggtcatgcctaactcataccaggtctctcttccatccgccttaaactgactatagctctcccaggcagaccaatagacaggggatcatggacaccaacacacagacacatcctcccactccccacccacacaatgaaccaaagctcagggcagccactgtgtgctctcgtcccacctgtcctgttgcaggagagaagacaggaggcaaaataggatggaaagtgggtctaagataatgagtggggagagggagtcaaagaaactaactccatccccaagaaatcaggcaaggcttccaggaggaggtgaccactatcctgagagtatcttccaggcttaagagagggaaagggctctgcaaggaggtaaagtggcctgggcaaaggcgcagagcatcagaatccacatagccagtgacctccacctgcctcctctgcctcatcctttcagctctacctccagggaggctggagggcagcacaggggagggtgggtgtcagagccctgtggcccccaagggacctgtgtccaagcagggaacttctctgcagctatggcagagtcagctttagagtcttctctccttccagaaccattgaactgcaaatactccttaaaaaccctgatccagcccaggcgcggtggctcacgcctgtaatcccagcactttgggaggccgaagcaggcagatcacgaggtcaggagattgagaccatcctggccaacacggtgaaaccccgtctctaccaaaaatacaacaattagctaggtgtggtggtgagaacctgtagtcccagctactcgggaggctgaggcaggagaatcacttggacccaggaggtggaggttggagtgagtcaagatcgcaccactgcactccagcctgggcgacaaaagcaaaaactccatctctaaaacaaaaaacaaaacaaaaaaacccctgatccgctgcaaggatgcccccagccttcctgtcgtttttcccctctctgggtcacaggttttgaagtcaacctgatttcccccctcatctcctagtgccctgcttcagatttgggcaggtcttgctgaactggagtcccagaagagagcccacagatacaggaggctgtgtcccaggaaggagacataggcccttccttcttgaggccccaggagggagacaggacacagagacatagaactctcagtgaacagagcagaggccctgagagctgggcagttagagagggcaggaagagtgcaattgggcaatcaaggcaagcttcttggaggaaaggggcagggaagggtggatgtcaggggagatcagtctgcaggcaggctctggaataggtacagagtggtgagggattcgagttggattccagtttaaacatccacagagcctttaggcttcagtagctagtccaggggaggggggtacatggagggtgtccctatggccttgtcactaagaaagaacagttcgtgacttatccactgcgtgtgaattcagcgagattggggagggaggtttcttagggatagggcagcctccacactcccattgctcctctactcagggaaagggggacggtagaaatggcctgcctctccggccagcacacgtacagccatctcacccccacacggctcttcctccacagccccattttggattacacttcacctccagccactccagccctgggcgctagtactacagctcctggggaaacgccccggggtgttggtgcccgactcgtcccccagccgtcttcggcttcacggggtgggggagggacagccctgaccccatctgctctcctaggctgcctagcaggctcctgtcgccgctccccgccccttcttccagagttccatccactcctgcccccactcgaccagagttccttccacagcagttcctggcctgggcgctgtccagctccaggctgggtggtcgagtcttccctgggctccgagcagagggaactccgcagcccgccccagccttgtcctggggcgcctctgtccaagtcggttttctcttccctggcccccacgcctccaccctccacttctacgggatgccacctccacgaaggagaaaggaaaggaaatacaaaggcatacattccgtttctgtggaatttgctctttattttgggaccagggaaggaccacacacagccctccagcccagggggcgggggcaccgagacgcgggcggagggccgcacccgaaccctgcccagacgccgccgtcgggaggcagaatccgggtttctggggtcgggagtgcgtatgcaaatgacgtgggcgtggttggcagatctcccaggaggcctcaggggtcctcaccacaggtctgggccctccgacctgcggaagcgaaggggaaggaattggatctggggaggcgagcctgggagacgtcgttaagtgatgttgccagggtagggccaggccgcgctctcggatgcaggatgtgtggtaacgggcgcttttaccgcgacctgacggggcggtcctcgccgtcggggaagaacgttttggaaagaagcgtgtccgggccgtctcttttcccatacctgggggcggggaagggaagagcgtggtcagatctggccacgcccccaggtggagcggggccgcagggtgagagccccaggggtcccgctccgcgcctgcgctcaccgctgccgggtgaccaggttgaggtagtggcgcagggaggcgtagtagcggttcagctcctccggcgaggcgtcttcgcggggagcctcgggtttgatggggtaggcgtcgaccagcgcccctaggcagacgagcagggccagaagcactgtggtcaaggcgggccacggcctgcgcacgaacaccatctgggaaggcgacattgggacgtgggtcattccaagcctcgaccctacacggcgggaggctgcggctgccgtcggggccgcgctccgacgctctccctggggctggtaccggaccaaggctcagccaccgggcttgctgtgtgttcttgggcactgcaccgtctcctgactcagtttcctcatgtcagaggagcataagccctgcctgcctccccacccccacccccgctgctggcctccttcccacctccgatggccccctccaatccagtttcctaccactcacccccagcttccaccatcccagcctcagtttccccacaaaacagcctgggtttccccaggcttgagcccccagccactcacagcgatagcttgtgaagcagacgagcaggaggtggaaggcgagggaagtcccaagggctgcactgccgcaggtcaagctgaggcctcctctgctcagcgctttccttgtggggcttatatccccgcctggaaagggagggggagtcccagggggagggggagccagcagggggtgggcccttcttcctccctccttccaccctcgccagatcgctgagcttatacccagccagtgcgtgatgtctccacctcgcaggagctgagggggcagttgccatgctcagattcgtggtctcactggatggggtacccagcctgaaccccatgttcaccccacagccccccagtggcaggtctagcctcctgaggaagtgaagcggttggatctagactcctggggcagcccctaggaccagggttgagattctgtcttccctagcctgtccgtggatgggagttgggggtgggagggtggacacattccctccagtccgtgggatgtgtgaccactctttccaaaagacaacccttttcagcctctgttcagtaataccttggagaagggctgaggaatgacaggaccttttggggaaagtctttctcctggaggcagggtgggagcacctgaccttggctcctgacctgcagtttatggtgtcttggggagaggcctctctgaacactccattatgtcctctctctattaaagagttggaaaagaggcaggaggaggcagaaaccaatctccccgccagaagcagctgagtcggccacctgtgtatccagactggcacacacagaccccagtccagccatgtgtggtatagagccccctcccaaggcagagtgtctccacccctatgcaggtgtcattcagagcactggtgtcttctgggcctgagtgatgccaaggcttcccaggcacatgccactgtccccagcccatggcagtctccactgggctctaagcccagatcctttgaaggaaaggactcgtgtttattaagcacctactatgcactaggtagtgcataatttcgggcatcacaagacgatgagctgagtttatctccattttccagatgaggaaactgaagccctgggaggtgatggagcagccaagctcacccacaattcaaacaggaaaagcagggtgaggcagaacccaggaagaggacctctcaattgtgaggggcagaaaggctcagcacctggagtagccattggggcgccagaggcaggcctgggagcagggacccgaagactaagtctagggcccacacccactctgagaggcggagtaggggaaggaccttcagactgccaaccccctcaaacccacctgcccaggaggagaaagggctgtgggaaggtctccccataaagcccttccagcttcctctccctggcctcgccagacctccagtacttccagatgtcccatcggcccatagggactgatggggccaacttgtccaggcccttggttctgagccagcccctccagccccaggacagatggctgtgggcgctatttttagagctctcctgagatggggagttcagggctctctgtcaccattttatgggttcaatcacctgcattctccggaaatggctccttatcagccagtcaggccccatgggactccacatcccaggaaacaccagggtgccctgctgagcatgggggtggaagaggacaccaggacaaggggacatagatcctgcccttggagggaggagaaaaatcattcttcttagggagccctcatccagggggcaagacacacccctgcccttcaagaaccccagtctcaaaggagagatatggccatgtcataggggagccccagtatgagcggttcccagaacagatacagagagacagagacagcctttgtcctgtttggaggggagacagcagaaatcaaataattccattcctccatggaaagacaaaagacaggtgctcaccctaggatggagggagcagtgggggctggttaggacatctgtgatcccagggatcagggcctagagaaggaccctgcaggctaacgggggcaaggataccagagagtagggggctatttgctcttctgaccctgcggcggcactaaccatggtgctggtaggggatttctagtgcaccgattctggacagagacgaaggaaactgtgagatggccatggggaatctgacatccctggaaccctgtcatgtcttggggaatgtggagtccaaggacagatgggaagagaggagagacactgtagaagctagagggcatggggtggcctgaattcgggctacaacctctgaagaagtcacttcctcatttatagccaaagtaaatgggcccctaggtggtctcagtgtggaccaggagccagccgcacatccccgcaaaccctctctatccctcatacccccaccctccaatctcactccccaattacagggcaagctgattggttcattaatcaccgcctcctcatcgaagagcttattaacttgttgattagcggggaaaatgtctcagccctcgatcaatgggctcagccaccccccgatccacacacccacacccatcattgctgcatgactcagtggccatgagacatgtctagggtgtgaggggggaaacttcagaaacaattgtttttgtagaagtgagaccaggacctgcctccggtttgtccttgaagggtgggggacagaatcaaaggggaggggacagaatcagaatggtccccattctgagagcacctggcaaggccaccccaagtcagggagaccatggacctggaccccagccaacaattctccttgtccagtgggctcaagggccactcatcaagatggtgtggcctctgccattcatccccagaggcttagaattctgtaccccatcacccacctgcctgtacccactccccacacacaaggcctcactttgatcaccatgcactgtgtggcactgctccactgctttccaccctcaggcatttcctcatgcccagggtcctagagatagcaggttgtcatacagcaagtgtaattcaggccaggcgtggtgctcacgcctgtaatcccagcactttgggaggccaaggtgagtggatcacgaggtcaggagttcaagaccagcctggccaacatggtgaaaccccatctgtactacaaatacaaaaattagccaagcgtcgtggcgcatgcctgtagtcccagctactctggaggctgaagcaggaaaattgcttgaatccaggaggcagaggttgcagtgagccaagatcgcgccactgtactccagcctgagcgacagagtgaaactgtctccaaaaaaaaaaaaaaaaaaaagtaattcaatcctcattcaacaagcacttaagtccctgctgtgtgccaggcactgatctaggcactgggatagagtagtgaacaaacaggcaaaatccttgcccttatagagctcacattctagtgacaggaaatagaaaataaataaataagcatggaggctgggtgcggtggctcacgcctgtaatcccagcactttgggaggccaaggcaggtggatcatctgaggccaggagttcaagaccagcctggtcaacatggtgaaaccccgtctctactaaaactacaaaaattagccaagcgcagtggcgggcgcctgtaatccagctacttaggaggctatggcatgagaatcacttgaatccaggaggcagaggttgcagtgagccgagatggtgccactgcactccagccttggtgacagagtgagaatctgtctcaaataaatgaataaatacataaataaataaataagcatggaatatgtctgataagtgctatagagaaaaatcagagccgggtgtagtggctcatgtctttcccagtgcgctgggagaccacgttggaggatcgctcacttgagcccaggaaggaagtgaggaagcaaaccatgaagctaccttgagaagagcagggggtgggtttaggaaacagcgatgccaagaagtaagggattttcactttttatggtaggagctctcctaggagctctccctcttacctgaagcttctgcaaaacacagtaacagatacttgtggtgtgctgcgcgcccaaggctcaggcttcgctctaggacagaggtaggcaaactctgtaaaggagcagatagtaaatattttaggctttgtggtccatagagtttctgttgacaccgttaggttcatccaccgtagcttgaaagcagccactgaatacaccaaaaaaaaaaaaaaaaaaaaaagaatgggcatggtagtgcttcagtaaatctttacttacagacattaaagtttgaattttatataattttcatgtcataaaatttttttagtttatttcaactgtttacagattcaaccactttaaaagccattctttttattattattgagctcaagggatccttcggcctcagccacccaaaatgctgagattataggtgtgagtcactgtgcctgacctaaaaggcattttttttttttttgagacggagtcttactgtgtcacccaggctggagtgcagcagcatgatctcagctcactgcaacctctgccttccttcaagagattctcctgcctcaacctcccaagtagctggaattacaggcacatgccaccacgcctggctaatttttgtatttttagtagagatggggtttcaccatgttggccaggctggtctcgaactcccagcctcaagtgatccgcctgccttggcctcccaaagtgctgggattacgagtgtgagccaccacacccggcccctaaaaggcattttaacccatagaatgtacaaaaacaggcccacagggccgtagtttgctgacccctggtctagaaaagcaagaattcagctacctctgggttgagttgccttttggttggatgtgtccctagcctgtttatgccaggtgtatttgtcattgtaatcatataattgaattaaatattatataaactgatgaaatatgagtgcataaagaattgtttccttgcaaactacgttaaatgctttggaagtaatacacaaagagatttgctgacatgttgaattagatgtgaaagataaaccattaagggaaaatcctaaaaatctagaagtgtgctacatcagattgcttcacaagtgtctttaagtttaaagaaactggaaataacaggtgacaaattataggattgtgggtgtgatttatgcaagaaagtcaaagggtaatttgagtcaagacacccaaagaaaaattcgtgcctcaatgtgaattttgtgtttgaaatcaaaacaaagtgactaagacctgtatgtgtctttatgattgcccatttaagctgactttttcaaaacactggtcaatgactcagacctgtttatatcaaaacaagggcttctctagtactttatatatttccaatatagtttgaatgtttaaagggtatttctatttaatggcttaaataacaaccaaagaatttttaaaaaccaataaaaataggctgggtgcagtggctcatgcctgtaatccccacactttgggagaccaaggcgggcggatcacctgaagccaggagtttgagaccagcctggccatgtcgaaaccctgtctgtactaaaaatacaaaaattagctgggtatggtgatgcatgcctataatcccagctacttgcgagactgaggcaggagaatcacttgaacctgggaggcggagattgtaatgagccaagatcgctccacagcgctccagcctgggtgacagagcgagactacgtctcaaaaaagaaaaaaaataaaaataaaaataaaatgctggtgtgtgttgcgaagcctgaaattagatactgtgagggtccctgggcgccagcccctgtgagttctgcgcacatcccctccacatgaatgctcctgtttgaatccaaaacttttttaagggcccaacagtctcaagaggcctgtgctgcaggtgcagaaactcaagtcctgaaagaggtatggattcagggagaaacagttctgacctaggtcagacacagtcagctccctgattcaccaggcccttatggacttgtgtctttgtggctcctggcatctgatgtgatactggcatgtgtgtgctcctaggttattgaatcagtcagtcaacatgtgaacatattagctaagatattcatgcacccccccttaatagataccaaatagcggtagcttaaatatcatagatgtttatttctctcttgtataagaaaccaagctggtagccaggggatagggtgcctctgatctacaaggagcccaaacaccatctatcttgttactccaagttatgcacccatctacatggtttaagaatgtttggccgggcgcggtagctcacacctgtaatcccagcactttgggaggccaaggcgggtgggtcacctgagatcaggagttctagaccagcctggccaacatggtgaaaccccatctctactaaaaatgcaaaaattagccaggcatggtggcaggtgcctgtaatcccagctactcaggtgggccgaggcaggagaatcacttgaactgggaggcggaggttgcaatgaactgaggcactccagcccgagggacgagagtgagactttgtctcaaaaaaaaaaaaaaaaaaaaaaacaatattcattaggccagacgcagtggctcacgcctgtaatcccagcactttgggaggccaaggtggtggatcaccgaggtcaggagttggagaccagcctggccaacatggtgaaaccccgtctctaccaaaaatacaaaaaaattagtcaggcatggtggcgggtgcctgtaatcccagctactcaggagactgaggcagcagaattgcttgaacccaggaggcggggattgcagtgagctgagatcatgccactgcactccaacctgggtgatagagtaagactccgtcgcaaaaaaaaaaaaaacggtgttcattaccccacattcacattccaggccaccgggatgagaaacaaggaagttaagagtttggtatggtagaggtcaggttcctggcccacacctgtaatctcagcactttgggaggctgaggcaggaggacacttgagcccaggaatttgagaccagcctgggcaacataacaggatcctgtctctacccaaacaataaaaaataaattagcctggtatggtggtgcatgcctgtagtcacagctacttgggaggctgaggtgggaggatcgcttgagcctgaggagtcagagctgcagtgagttgtgattgctccactgcactccagcctgggcaacagagcaaaaccccatctcaaaaaaaaaaacaaacaagcaaaccaaaaaagcaaagtcggggaggagggaaagtatcaggaagaatagctaatggctgctgggcttaatacctaggtgatgggatgatttgtgcagcaaaccaccatggcacatatttacctatgtaacaaacctgcacatcctgtacatgtacccctcaatttaaaagttggaaataaagagtatgatgaggaagctgcattgcttcctgtgctcctgtcccattggccagaacttagtcacgtggccatgcctagctagaaggcccttggctctgttttgctccattttctttttctttttactttttttgagatggagtctcgctctgtcacccaagctggagtgcagtggcgcaatctcagctcactgcaacctccgcctcctgggttcaagtgattcttgtgcctcagcctcccgagtagctgggattacaggagtgcgccaccacacccggctaagttttgtatttttagtagagacagggtttcccccatgttggccaggctggtcttgaactcctgacctcagcctcccaaagtgctgagattataggcgtgagccaccgtgcccggcctgttttattccattttccccaaccctcatgccagcccaatttctgtcttctctgcctccaaactcagctatctcttaccacattgaaagtggccttcacctcagcatgcatcctcctcctccctcaatcccctgcctggaagtgggagcctgtcaccctacctcacgcatcttttcctttcactctttcccatcagtcttaggaaagagaccataaattgttccccagtacctattttccccttcttctcttacaatagagtttagctgagtatatggcttcccagctaatcactacatttcccagtctcccttgcagccaagtgacttcttgtgactaagttccggccaatggatgtgagcaagagtgatgtgtgccactctcaaaatgtgctattagaaggaatgggggtaccctctcactcctctatttccccccttccatgacccttaatgcaatgccaaatggaaatgtaaaaatgagccattttccagctttattgaggtatcattaaccaataaaattgtatatacttaaagtgtacaatgtgatgatttgatatatgtatacattgtaaaatgattactgcaaccaaattaacacatccatcacctcacattgttactttttcttatgtgagaatgcttaagatctacactctatagtacagtattattaactattaactatagtcaccatgctgtacaaaaaatgagcattcttgaccacgtgaatgaaggaatcttttagtcacaggggtgccctcagactgccgggaccaatttgcctgcatcacgttggaagtgcctggggcttccccattccccaggggcgggtttaaccaatgactgatgaatttaggggcataaacacttcagtttgcctctgatttgtatgacttgagatgtagtcaacaggtgttacctggaaagtgcaatgggcattttttggggggcggcacacagctgctgaaacagccatcacagtagcaggcgagggcaagggcaccaatgccctcgttcaagtctaaagggcctggagaagttcttgtcccctgagctctcagcactgacccgccagggctcccttatggtactgaacccacagataagccactaagagcaggatcaaaattaagcagcacagagacaagaaaagggggagaaagagatccagataaaaaggggagagaggaacagagccagaaaaagctcagaccaaagccaccgtcattttcacattacgtgaaaacaataaaaggaagagatttgtgaagttagaaaaactctctggtgaagcctccttctgaaaattcaggaaaattagtttcacataaaaattagcaatgtaaaagtattaagctcaaatcccatacaaaactattatgagaaaaatagccctgagctgggcacggtggctcatccctgtaatcccagcactttgggaggctgaggcaggcggatcacttgaagtcaggagttctagactactctggccaacatggtgaaacctcgtctctactaaaaatacaaaaattatccaggcgtggtagcacacacctgtaatcccagctactcaggaggctgagacaggagaatcacttgaacccaggaggcggaggttacagcgagctgagatcatgccattgcactccagcctgggcagcagagtgaaactccatctcaaaaaaaaaaaaaaagaaagaaagaaggaagagaaggaagggaaggaaggaaggaaggaaggaaaagaaagaaagaaagaaagaaagaaagaaagaaagaaagaaagaaagaaagaaagagaaagaaagaaaagagagaacagagagaaaagaaagaaaaagagaaaaataaccctgaccaggtgcagtggctcacgcctgtaatcccccaacactttgggaagccgaggtgggtggatcgcttgagcccaggagttcgagactagactgggcaacataaagagaccctatttctaccaaaaatacaaaaaaaaaaattctgatatggatggtcaaaataggaaaaaaatacaaaaaatagctgaatatgatggcatgcacttttagtcccactacttagaaggctgtggtgggaggattgcttgagccgagatcaaggctgcagtgagctgtgaacgtgccactgcactccagcctggtgacagagagagaccctgtctctataaagaaagttatgttatattaccatcatttttctttctttcttttttttggggcagtgtgaggggacagggtcttgctctgccatccgggctggagtgcaatggtgcaatcagcctcctgagcagctgggactacaggtgcataccaccacatctagctaattttaatagtgttttattcttttatttttgtagaaatagagtctcaatatgttgcccaggctggtctaaatttcttgggctaaagcaatcctctcacctctacctcccagctattctgtccttcaaatgcataatcaaactattatcagcatgcaagatctcagggaatattatgcccataagcttttcctgaggaatctactagagaataaacttcagacaaccaaaatgactagaaaaacattgacataaggcctggtgatgagcattaagttcagttatgtagaactaatgctggctggatgcggtggctgacgcctgtaaccccagcactttgggaggccaaggcaggcggatcacctgaggtcgggagtttgagaccagcctgaccaacatggagaaaccccgtctctactaaaaatacaaaattagccaggcatggtggcgcatgcctgtaatcccagctacttgagaggatgaggcaggagaatcgcttgaaaattagctgtaatcccagctactcaggaggctgaggcaggagaatcgcttgaacccgggaggcggagtttacggtgggccgagattgtgccattgcactccagtctgggcaacaagagtgaaagtccgtctcaaaagaaaaaaaaaatcaactgttttccgtaataactggtggtgccagtccgtatttattctgagacgtctgtgtaatatagatcaaacaaatgctattctaaaataaatgggatttttaatgctaccatctcctgtgtccttgagaacaagaatttacaatgtggaagaaagaggacacagatgtcatatagaagaggttaaataaacacccgtcagtcctgactttgatttggaaatctctgtttacagaaaagggctagaaacaatgttgaaaccaatagcaatgaacatccttagcatccagactagtcttttttttctttccttttcttttctctttttttttcttccaggtttattctggaataatggacaaataaaaattgtatatatggccaggcatagtggctcacacctgtaatcccagcactttgggaagccgaggagggtggatcacttgaggtcaggagttcaagaccagcatggccaacatggtgaaaccccatctctactaaaaatacaaaaattagctgagcatggtggcaggtgcctataatcccagctactcaggaggcggagacagcagaatcatttgaacccaggaagcagaggttgcagtgagccgagatcatgccattgcactccagcctgggcgacggagtgagactccgtatcaaaaaaaaaaaaaaattgtatatatttggccaggcatggtgactcacacctgtaatctcagcactttgggaggccaaggcaggcggatcacttgaggtcaggagttcgagaccagcctggccaacatggtgaaaccccgtctgtacccaaaatacaaagttgccaggcatggtggtgtgtgcctgtaatcccagctacttggaaggttgagacaggaaaattccttgaacccgggaggcggaggtttcagtgagccgagatcatgccaccacactccagcctgggcaacagagtgagaatccatctcacaaaaaaaaaaaaaaaaaaaaaaaaaaaagagagagaaacaagtaaaattatatttttttctagccattgtaagtacaaaacaaaaaatgattttttcctggcatttcctgtttctgcctatttacattggtgctccccaagatgagatgcttggctctcttttcttttttcttcttcactgtagggttgtcatctacccccaagattttaatcacccccaaaatccctgtaatttgctcctctgccgagttccctatccacatagtccactgtttctagacatatccccatggatatctctcagtcagcttaaagtcaatgtagcctaaatagcaaaaataataaatcaatctttcttaagtgcctacactgtgccaagtactatgccaggtacgtctcacatattattttagtcttcacaacacataatgtaccatcattagcctggttttacagaatatgaaactgacacagagagaggtcaagtcagtagctcacccttatcttagcttgttatctgaattcccaaatctccagggacctccagctccatgaatggtatctccatctcttcaggtgactgagttggaaatcttgacttcactccaccaatgacctgagtcattcttagaaagtctgaagaaggagcatgcagttctgagggtggcagcaggtccaggaattggaatgtgaccacaggggaattcctcataaagggctgaacttgcctgaatgagtttcctctggaatacaaggaagtcatatgaaatcgcagtttaggcagtgcattcaagagtacatggcagacatcgtttcgtgttaataactatatcctgccctttaccccaacactcccaatcctccttatctgccctgtttattccccagcacttagcactttctagcattctatgtaattgacttatttgtatgcttgttgtctgactactagaatggaggctccatgagagcagaggtttttgtctgtttcttcactgatatatccccagtgactagaataatgtgtgatacatggtggtggctcaagtacacttgctgaatgaatggatccacatcctcactgtccatggctgcatggtttacacacaggcacatacataagcatgtatacacacatacacacacatgcacatacatgcatatgtcttgaagacagaaggctattcctatcccaccacagtccagatcttcatcaaagaagaaagcaaaaggccagacgcggtggctcacacctctaatcctagcactttgggaggccaaggtgggtggatcacctgaggtctggagttcgagaccagcctggccaacatggtgaaaatctgtctctactaaaaatacaaaaattagctgggcgtggtggcacgtgcctataatcccagctactcgggaggctgaggcaggagaatcaccagaacctgggaggcggaggctgcaatgagctgagatcacaccactgcactccagcctggatgacagagtgagactctgtctaaaaaaagaagaagaagaagaaagcaattccctaaacactatgcactctcccttcacacactgtgcaggttagagggagtgagatatcagggcctgtccacagcaggcgagccccatacctcaccccacagagctgtcacattcaactccctctgaagctgtggaacttgcagctcagaccacaaactctggggctaggatgactgggttggccactgactagctgtgtgatcttaggaaaattacttaacctctaagggcctcagttttgtcatcggccacatgtatataacaatagcatctacttcatatggttgtgatggtttaaaaagctattaggttccagatgagatggagtaagcagcctccaccctgtctctcctgctgaatgctgctgtgaaacatggacagacacgcacggggcagctctctgaagagtgtgaaagtaaacacagcggggaaacgggggaagaaagccagaattcaacgttccactgagctgaaatgagtttctcatttttcctctgatattccccagcctcgatacaagacagcgccaaatccagaatgggcactggggctacgagagggatcaacaggagaaatgctcgttctgcctcgaggagtggaaagggaaggtctagcactgagagagagaaaaggaactccatttttctcttcttcattctcccgtgccccagccccgagacaattccatgggagtagcagtggtgacagtagtatcagtggctgcagggtccacagacaaccaaatctttccctctccgatcaagagttgtgggccaggggctgtggatcatgtctgtaatcccagcactatgggaggccgaggtggatcacttgcgggcaggagtaagacaccagcctgggcgtgtatgtgtgtgtgtttatttttaaaaacagttgtagtcccaagaaggagaacccctatagctttcttctctctgtgtcctcctgccacctggccctgaacacggacacaatcataggaagtgtgcagtagagcgggataactaaagaagaaataacactgattttacacaatctcttccagaaaatagaacaagagaaaatactccttcgttcattttatgagggcaacattaccctgagaccaaaatgaaacaaagatattgtaagaaaaaaaaactacagatcaatatctctcatggacatatatgtaaaaatcttcaacaaaatattagctggccaggcgcggtggctcatgcctacaatcccagcattttgggagactgaggcagatggatcacttgaggtcaggagttcgagagcagcctggccaatgtggtgaaactctgtctctactaaaaatacaaaaattagccaggtgtggtagtgtgcacctgtggtcccagctactcgggaggctgaggcaggagaattgcttgaacccaggaggcagacgttgcagtgagccaagattgtgccactgcactccagcctgggcagcagagtgtgactccatctctaaataaataaataagccgagctcagtggctcaagcctgtaatcccagcactttgggaggccaaggcgggtggatcgcctgaggtcaggagtttgagatcagcttgaccaatatggtgaaaccctgtctctactaaaaatataaaaattagccaggcatgggggcatgcgcctgtagtcccagctactcaggtggctgagacaggaaaatgccttgaacctgggaggcagaggctgcagtgagccaagatcgtgccactgcactccagtctgggcgatagggtgtgactgcatctcaaaaagaaaaaaatattagacaactgaactcaggaatatataacaaaaaaaaatgtatatgttacaatcaggtgggatttatcctgacaatgcaaggctggttcaatattcaaaaatcaatcacttggccaggtgcagtggctcacacctgtaatcccagcactttgggaggccgaggcgggtggatcacttgaggtcaggagttctagaccagcctaatcaacatggtgaaaccctgtctctactaaaaatacaaaaattagctgggccgtggtggcgggcacctgtaatcccagctactccagaggctgaggcagaagaatcgcttgaacccaggagcagaggttgcagtaagccaagatctcactactgcactccagcctgggtgatagagcaagactctgtctcaaaaaaaaaaaaaaaaaaagcaaatgctcatattgattgataaagaaaaaccatttgacaaaaattcaaaatccactcacaattaaaaaacaatactcttaggccaggctgggtatctcacgcctataattccaatgccttgggaggctaagtcaagaggtaggtattgcttgaagccaggagttcaagaccagcctgggcaacatagtaagaccctgtctctacaaaaaaaacttttttttttttgagatggagtctcgctctgtcacccagactggagtgcagtggcgccatctcagctcactgcaacctctgcctcctgggttcaagcaattctctgcctcagcctcccgagtagctgggattataggtgcccgccaccgcacccggctaattttttgtatttttagtagagatgggatttcaccatattgtccaggatggtcttgaactcctgacctcatgatacatctgccacggcctcccaaagtgctgggaatacagacatgagccaccacgcccagccaaaagtttttttaatttgttgggcatggtggtgcctgtagtctcagctactggggaggctgaagtgggggaatcgcttaaacccaggagtgtgaggttaccgtgagccatgatcacaccactgtactctgcctggataaaaaaacaagaccctgtctcttaaaaaaaaaaaaaaaaaaaaaaaaagctggggaaggtggctcatgcctgtaatcccagcactttgagtggctgaggctggaggatcatttgaggccaggagttcaagatcagcctgggcaacatgaaaaaaccccatctctactaaaaatacaaaaattcctgggcgtggtggcacatgcctgtaatcccagctactcaagaggctgaggcatgggaattgcttgaatccaggaggcagaggttgcagtgagctgagattgcaccattgcactccagcctaaacgacagaaggagaccctgtctaaaaaaaaaaaaaagacagtgagtgtagtacaggtgaaatgacagatagctaggtcaatggaacagaatagacagtacagaaatagacccatgcaaatatggcaaattgatttttgaccaaagtgcaaagacaactgaatggagaaaggactcctagaaccgccagcatagtcaggacacagaaggactgtatcactccgaaggaccccctagtactatccctgtgtggtcaggcctctcagccctaatgtttgcacccactaccatcactatagttctatcttttagggaatatcacacaactggaataatacagtatgtgacttattgagacaggctttgtccactcctaatgcccttgagatgactccaatttgttctgtgtatcaatagtccattcctttttcttgctgaatagtaaatatgccaatatattaatgtggtttgtttactcagttacccattgaaagacattagggctgtttccattttggatcaactatgaataaagcggctataaacattcatgtgggcatattcatctctctaggataaataccctgaagagagttttctgggtcatatgtaattgtgtgcttaattttagaaaaagtgcaaaatgttttccaggatggctgtaccattttgcattcccaccatcaatggacaagagttctaattgctctgcaccctctcggcacttcggattgtcaatattttttatattacccattctaatgtgtggatagtgcagctcatcatggttttaacttgcattttccggccaagcgtggtggctcacacctgtaatcccagcactttgggaggccaaggtgggcagatcacgtgagatcctgagttcaagaccagcctggccagtatggtgaaaccccatctctactaaaaatataaaaattggccgggcatggtgacacaagtctgtaatcccagctactcagtaggctgaggcaagagaatcacttgaacctgggaggtgtaggttgcagtgagccaagatcatgccaccacactccagcctgggtgacagagcaaggctctgtctcaaaaaaaaaaaaaaaaattgcatctttctgttgtctaatgatgtcaaacatctattcatgtgcttatctgccatctttatatcctccttggtgcagtgtctgttcatgtggtttttttttttttaagtgggttgttggttttcttattgttgagtttgaagggttctttatatattctggatacaagtcttttgctgaatatgtgatttgcaactattttctttcagtccgtagctggttttttcgttttcttaaccctgtctttcatagaacaaaagtttttatttatgatgaagtccaatttatcaattgttctcttttgtgactcattcttttgggtgtccagtctaagaactatttgcctaaactgaggtcatgaagattttcccctacttttctctaaagttttattattttacattgctttcccttttgagctaatttttgtataaggtatgaggtttcggttgaaattctcttttttgtgtatgaatgtttattgttcagacaccattattgggtctaggaatctatacatgtgttaaagctcataaagctgtacaccaacaaaatggtcaattttattttatgttactttagttatttatttattttattttattttatttatttatttatttatttatttatttatttattgagagagggagtctcattttgtcacccaggctggagtgcagtggcgtgatcttggcctgctgcaacctccacctcccaggttcaagtaatctcctgtcttagcctcctgaatagctaggactacagctgtgtgtcaccacgccgggctaattttgtattttttttagtagagatgggatttcaccatgttgggccaggctggtctcaaactcctgacctcaggtgatctgcctgcctcagcctcccaaagcactgggattacaggcgtgagccgccacacccggccaactttatgttactttaaaaaacatttttttttttgagacaggatctcaatcaccgaggctggaatgcagtggcacagtcatagctcactgtaaccttgaactcgtgagctcaaacgatcttcccacctcagccttcctagttgctaggcaaacaggcatgcaccactatacccggctaatttgtattagtatttatttttggttttgttttgtttttttgagacagagtctcactctgtcgctaggctggggtgcagtggcgtgatctcggttcaccgcaacctccgcctcctgagttcaagcgattctcctgcctcagcctcccaggtagctgggactacaggcgtgccaccaagcccacctaatttttgtatttttagtagagacggtgtttcaccatgttggccaggatggtcttgacctcttgacctcgtgatccgcccgcctcagcctcccaaagtgccgggattacaggcgtgagccaccgcacccagcctatttttgttgagacacgatctcactatgttgcccaggctggtctcaaactcctggcctcaagtgatcctcctgcttcagcctcccaaagtgctggattacagatgtgggccacagcactctgccaaaaaagtcatttaaaaaaaaaaagttatttctaaagtgcttagaacagaacctgaaagtaagtttttaaaaagtgtttgtcacttaaagataaattcctggcttcctaggcaagccaccctcctactgtaagcacccatgggtggctactgacagatcaggagagtctctggggtttgtgcctggtgtgggatcacatcctaggtcgttgtggaggaaaagttaaatattaaatctgaactcaattgaacatggacacaaacaatggtcaccaagtaccagaaggggctgtgtgagccccttgaggcattcatccagcgctgttttggagaaatctctatttcaatctattcctatacgttactgaaaaacaaagctgggcgtggttgctcacgtctgtaatcccagcactttgggaggccaaggtgggtggatcacctgaagtccaggagttcgagatcagcctggccaacttggtgaaaccccgtctctactaaaaatacaaaaattagccaggcatggtggcggccacctgtaatcccagctgtttgggaggctgaggcaggagaatcacttgaaccgggaaggcagagattgcagtgagccaagatcgtgcctctgcactccagcctgggtgacaaagcacgactccgtctcaaaaaataaataaataagtatataagaaaaacaacagacaatcgcaaaaacaagttgacctttttgtgttccttgagcctggtcacgaagggccttcgtgcctggacctcatgccaaacaactcgttacaaaagagctagggtcctagattgtgccaaagcttcatgagacctcttccttgtctgtgcacggacaagtggccgactctggagccgacccaggctgttgcttcccagtctggtggtgaatcctccatagtctggtgagtatgaatatcttttcccttctccccttcccattgcaatttgcttattatatcaatctgcttattattatatcatttgcttattatatctacattgccatttacatgggataaaggttgtttacccttaaaggtatcgtgggtgtgtcttttcttccctcgcgcatttcccgcacataacatttgtgtccccggatgctactgtgcaagcagaagagaagcaacaggcagattcagaccgtcctgcacaaactgccccctttactagtagagggtggggtggaagggcaggcagtgggggatggttctaggtgaacacgcaggcacctttggagggaggtgtcccatggttgctcaaagccccactccagaatccgacaaaacctgcttcaaaccctgtgtcaattgttcacccagtctctgtggtgtgagcaaatcatttcatctctgagctttggttttgtcatctgtgaaaaataggtcataaaagtgcccgtaaagggttaggaggattgaatgaaataatggctgtcagaagctcaggactgttgccagctcaatgtaagcaccccataacgtgctacattttcttgctattgtttgcaataaagagactggcaggatgcgccctcagtgtgaacagtggagttatcttttgttgcgggaattcgggtcctaacattgtattctaaaaatgttcagagttacagcaaattgaaaaaggctgttcagcaagtggtgctggtgaggattaggatgctttttctttcttttggcttagctatagtttatatttttctacagcagacatatattatttcgataattagaaataaatatgggggggaggatagggaaaaaaaagttcaacagagtaggacaaaggacagagccctgtggtgcaaagccgccatctcccgctttcagtcatggattgcctttagaagcagcctctcatttaattagaaattcttccagccgttgagccatttcgcccacacatcaccccatgtctgcaggatgtcaggagagattgtgctgtgtgccttgctgaagtccagacatgaggagttgcggcactcctatccccgaccaaataattccatcaacggggaaaatcagatcaacccagaaccatctgttcttaatggtttctgaacatgtctttcctttccacatacttacaaacctaggggtggtggaaagggtatggattccggagtcagatgttctgggtttgaatcccactcgcatttcttagctgtgtgactttgagagagtttgcttggcctctctgagcctcactgtaaaaagagaatagtaaagctcgtgtcacaggcttcttttggcaattaaacagtgggtaggctgagcacagtggctcttacctgtaatcctagcactttgagaggccaagttgggcggattgcttgagcccaggagttcaagagcagcctgggcaacatagcgaaatcttgtcctactaaaaataaaaataaaataaaataaaatagctgagtattgtagcacgtgcctgttgtcccagctacttaggaggctgaggcgggacaatcacctgagcccagaaagtcaaggctgcagtgagccgagatcataccactgcactccagcctgggtgacaggagtaagaccctgaaaaaaaaaaatatatatatatatatatatacacacacacacacatatatatatacacacatatatacacgtgtacatacacgtgtctacgtacgtgtacatacacgtgtctacgtacgtgtacatacacgtgtctacgtacgtgtacatacacgtgtctacgtacgtgtacatacacgtgtctacgtacgtgtacatacacgtgtctacgtacgtgtacatacacgtgtctacgtacgtgtacatacacgtgtctacgtacgtgtacatacacgtgtctacgtacgtgtacatacacgtgtatacgtgtataagcgtatacatgtatatgtataatacgtatacatgtatacgcgtatgtacatgtatacatgaatatgcatatatacgtgtatacatgtatacgtatatatgtatacatatatgtatatatacatatgtatacatgcatgcatatatgtatatatacgtatatgtatacatatatacatatacgtatatgtatacatatatacatatgcgtatatatacacatatgtatacatgtatacatgtacgtatatatacgcatatgtatacatgtatacatatacgtatatacacatatacatgtatacatatacgtatatacacatatacatgtatacatatacgtatatacacatacatgtatacatatacgtatatacatattcatgtatacatatacatatatacacatatacatgtatacatatacatatatatacacacacacacatatatatatatgccagccacgtgtggtggctcacgtctgtaatcccagcactttgggaggctgaggcgggtggatcacctgaggtcaggagttcaagaccagcctggccaacatggtgaaaccccatctctactaaaaatacaaaaattagctgggcgtggtggcgcatgcctgtagtcccagctactcaggaggctgaggcaggagaatcacttgaacccgggaggtcaagtttgcagtgagccaagatcacgccactgcactccagcctcagtgacacagcgagactctgtctcaaaccaaaaacataaaaacaaaaacaaaaaccaaccagtgactatctctatatgtttctctaccccctaccaaaatgtggtttcctcaaggacaaggcaggggcttctgatctttgtgcaccagtgcctggcacagaaggggaccatcactccacctcaccccaccctacccgatacacatcccttcttcttgctcatgtctctgccaccggcctctacccacatttctccacaattctcaccaactccctctccatatatgcttctccccagtgtttacctccaccctctcatgtccccccaccctgccttcctggcctagagtgacaggccccatccttcatcccccattctgtgtctccagtggccttgagctgctgtgcagcccatggccttcagcggggcagggagagggagggggagagggaggcagggatggcaattcatttacccaggcacttgttagcagcttcattagttccaagggctctgcagaaagccattagctgcgacttagtctgtgccatctatcagagaggagggtggaaggtgacagcagagagagaagaaaacaagaattgacccactcccacctttccgccacctcccagggagaacaaggcccaagtcagtgacctggaaactagagttccaggggccactcctggacgccccttgcaccaggactcatgcaaggagtcctgccccagctgggaacacgctgcaggtgttccggcacctgcccgcccaacactggcactgctgacctgcagttccttggcaggtgcacccccgactctccctgctccatgcccctttgtccctctgtccactttctcctgcttaccttcaccctactctgtgtcctcagcccagttctggggtcccttgaaactgcagcaccatctcagagccacctatgccactgccacaggggtcttcccacttagagtccccactttggagttggggccattcaggaaaacctcctgaaactgctgtcccagagcctggggctcctaaaaccactgctgagatggagatttcctctagaacaaggattcttaaacggggttcctcagtgagcctcaggggcctgtgaaccccttgaggttgcatagtaaaacatgtatcaaagtgaatcttggccgggcacggtggctcacacctgtaatcccagcatcttgggaggctgaggcaggcggattgcttgagcccaggagttcaagaccagcctgggcaacagggggaggcccgtttctacaaaaaaacaaattagccaggcatggtggcacgcacctgtaatctacactacttgggaggctgaggtgggaggatcacttgagcccaggaggtcaaggctgcagtgagccatgattatgccaccagacataagggtgacagagcaagaccctgaaagaaagaagaaaggaaagaaggaaagaaagagagagaaagaaagaagaaaggaaagaaggaaagaaagagaaagaaagagagagagagagaaggaaggaaggaagaaggatggaaggaaggaaggaaggaagggaagggaagaaaaggaaaggaaggaaaagagagagaagtgaactgtattttggctgggtatgatagctcacacctgtaaccccagcactttgggaggctaagacaggaggatcgtttgagcccaggagttaaagaccagtctggacaatgtagcgagactctgttctctaagaaaagaaaagaaagtgtatctttctggggaaaagcatctttcatggcttccatcagtatttaaagaccccccttgccagcctctctcccagatcatatctcctgcaggcaaggctcagtgtaattcccaaaacaggctattacacccccaccccagtttgggtctgtacctcagacagaaaagcaaggaacttctctataggacttgccacttgtaaatcacagtcacatccatttttaaaatgtaatctttgcaccaacactaaaggtagacaggaattgctatttgtagaggtcacctcccactcccaccccttggctgggttggggcccctccctgtgctcccagcagcatagccctccatactctgcatcagaagggccaaggcattggtcggtctaacccttaaactgtgggcaccccctgtaaagtgcccttatccataaaggtctgtttttcttctgccccttcctctttcctgtctgctggaataaatctctaatggctggagctgaagcagtcattttgggccatgcgatgagtgtcgcaccttagggagccaaagtgaaaagctggaaggatctctgaaccaccaaaaggcctctaggctttttacacgagggaaaaaaacttgatgtgtttccagcagttgttctcaaagggtgatttccagattggcagcagcagcagcagcatcacttggcggctaattagaaacacgcattttcaggccccatcccgaacctactgagtcagaagccctgggcatgggccccagcagttggagtcttattaagccctccaagtgattctgctgcacacttaaatttgagaatccctgatttaagtccttgttattttgaaatttctcttcactcacagctgagcctaatctcaaaccgataaaacatcagggaaggcagggcttctagacaatggctgcacctgcctatacagcagttttgtgggaaaaaaatttaaaggacttctttaacaaaaacatgcttatggatgacatagtgagacctcttctctaataaagatgaaaaaaaaaaaagctgtagtcccagctactcaggagactgagacaggagggtcacttaatgctgggagatgaaggctatggtgagctatgatggcaccgctgcactccagcctgggtgacagcaagactctgtctcaaacaacagaaaaaaaaatttatatatataattgcatatcctgcgcaatcagaagcagaccagcggtggggggagaaatgggtgtgggggtagctaggtgaggcccaggaatagaagagggggaagagtaggggagggaacaacagggccaagagagtttaatcagtgacacacagcttcaatttacccaaacgctagctccataaatgtcaaaacacattttcaactttttattgaagactagcacacctaaagtgcacagattgtaaatgttcagctcaatggattttcacaaacaaagcgcatcaatgcaaccagcacccagcttaagaaacagaacattacaagcccctaggaagtcctcccagtgtcccctacctttctatcccttccctgctgaggataaccatttttcctcatttctaacacataagttatgtggaatcagatagtattcttttttctttctttcccctccacctttttttttttttttttttttttctgagacagagtctcactctgttgcccaggctggagtgcaatggcacaatctcagctcactgcaatctccacctccggagtttaagcaattctcttgcctctgcctcccgagtagctgggattacaggcatgcgccaccatgcccggctaatttttgtatttttagtagagatggggtttcaccatgttggccaggctggtctcaaactcctgacctcaggtgatacgcccgcctcggcctcccaaagtgctgggattacaggagtgagccaccatgcctggactttttgttttgttttgttttgttttttttgagacagggtctcactctgtcacccaggctggagcgtagtagcgcaatctcggctcactgcaacctctgcctcctgcgttcaagcaattctctgccttagcctccggagtagctgggattacaggtgcccaccaccacactcagctaatttttgtatttttaatagaaacagggtttcaccatgttggccaggctgttcttgaactcctgacctcttgatccaccctcctctgcctcccaaagtgctgggattacaggtgtgagccaccgcacctggccacatagtattcttttaggttcagtttcttctgctcaatattatgtttgtgaaataaattcatccgtgttgttgtgtgtacagtttgttcattcttatctctatgtaatattctgtggtgtgaacatatcattatttatttatttgttgtagtatttacaggcatttggatagtttcaggtttggaactattatgattactgtggctacgagcatttcttttttaagcttgcccatctgagacagcagaacttttttttttctttttttttttagtacagataaggtcttgctattgctatgttgcccaggctggtctcagactccttgcctcaagcaatcctcctgcctcagcctccaaaagtgctgagattacaagcatgagaccatgcctggccgagcagaacattcttggaagtgtcttttggtgaacatatatacacacgtctgttgagtatatacacctaggagttgaattgctgggttatagggtgtgtatgtgttgcactttagcagatatggccaatttcctgaagtggttgtaccaatgtacactcccatcaacacagtatgagacctggttataccatatcctcaccaatacttggcatcatgtttgtcttttcattttagtcattctggtggatgggtggtggtatctcactgtggctttaatttgcattttcctgatgattgattaaaagagcatcttttcatggttttgtttgtttgttttttttttgacagtctcactctgtcgcccaggctggagtgtaatggcgtgatctcagctcactgcaacctctgcctcccaggttcaagcaattctcctacctcagccttccaagtagctgggattacaggtgcacgccaccatgcccagctaatttttgtatttttagtagagacggggtttcaccatgttggccaggttggtctcgaactcctgacctcgtgatccgcccacctcggcctccgaaagtgctggcattacaggcatgagccaccatgctgggcccttttcatgtttattaaccatttggttatcctctgttgtgaattgtctgaccaagccttttgcccatttttcttttgaattgtccaccttttctttttaatttgtaaacattctatttattttttggaaataagtcccttacaaatatcttctcccatcctgtagcgtgcctttccattctcttaatggtatgatcaatatagtccaatgtatcactttccataaacattttaaatcagtagccagaatatatgcatcctcctagcaattagatcaaattgcctcttcatggacaacttcttagctctgcgcagctctgcccaggggagctctccagagccctgcctacctgcatattagacccacactctcacccatacacatcaccccccaactctgaatgacaggtcagtaccagctagtaagcacccccatttcagagtggatggattgggaatcccatctctgagagtgtcaggccggcaggagaagccacctcagaagtctggagtgaggctaggatggggcaaaaacacttgtatatgtgtgagtcagtgagtgtgcttcctcatgcatggccctgaatgcctgtgtgcatttttgtaagaggagtctcctctactgattgaggaaggacagtacacactcatgtacgccacttaactacagtgtgaaccatgcccctagatgtgatgctcttgtgcagtgcacaaactgaacacttgtacttggtaggcttgcttacaggcagagtcaggcaaaagccagagaagggtttagctaaggttgtggtagaagcagggggactagcaggggctggggggaaagcaggttaaggcacgtggaaggaacagtcgtgactggacagaacccaacaggactggacaaaatctttcaagctcatgaaatgtcatcaagacttgtgcctgaagatgggtcaggctggattctgtgctcaactggctgcctgagcctgatgcctgtgttcagtctgtgttcaacgggctgctccaggctggggacagctgctcattttgtcctggataagagggtttcttcttcagatgacctttggtaaggggtgttctaaggagaaggaggaaagtggtggccccaagtctgtagcctccagcagccaattggggtgccaaaggcagctggaggccgggcgtggtggttcatgcttgtaatcccaacactttgggaggccaaggtgggcgaatcacctgagattgggagttcaagaccagcctggccaacatggtgaaaccccgtctctactaaaaatataaaaatgagccgggtgtggtggtgcacgcttgtaatcccagctacttgggtggctgaggcaggagaattgcttgaacccaggaggcagaggttgcagtgggccaaggtcacgccattgcactccagcctgggtgacagcgagatgctgtcttaaaacaaacaaacaaaaaacaacaacaacaacaacaacaaaaacgcagctggagtaggagacagggacaaggagggttttgggggtggagctgatgccctgagataagggaagcagtaaaggggtgctgggtggccctccagtggctctcctaccgcgggccctacctgatggagccccagctctggggcctgctcagtgccccaaagacccagtcctgctgagaacgggaagctggagcctcttctgggaactcagggatctgggtgcctgttcccaaggggagaatgagaactgttaggcagcagcctggctacagggggcactgcagggatgaggaccatgccctgggggctccctcaaggaccccaagcacacgtgtcataggcatagcccctcagataccactagctcacccactgccctcattcaacaagctcagacacccaacgctccccggggccgggtcttaggcgcacattggctcgcggtgcacgtccactctcctgtaggctcgtgcccttgacatatccggggctgtcacagtcccatgccccgaccccgaccccgcgcgagtctgcttgatgacgtcgctgtcgcaccccaccggcctccccgggtcctccccaggcgcgcgcaggggccgcgtgtccggtgccggccgggctgagtgttccgaggcgagcggctgctgtttgcgcagctaagtggcgtctgtgtacccagcggggcgcagcggtcgcgcgcttatctcccgcaaacaccgcgcccggatccgccggaaccacggccgcgccgccccatttgcacgccccggccgccggaggcccttatcgcccgcgtttatcgggccatcgctgataagaaaccgagggggcggcggggcggcccctctccttggatccaagaagcgatggggtcgctgttagggggggcgccagccccggggatgcggggagccttcgcagcctccgggtcagccctgctcctttcccctctgcgcggccgggatgtggcctcggcctggccgaacccggtgccctgtcggtcctggcctccttttccttgtggccctctacacagccagggccccacctcttgacctggattcacagcaggtgggagcaggaggctcctcgggaattcctaaacacagctaccatcgacaccacccataataaccaataattataataatatctaactgaactggggcgcgggcctgcctgagaagcatgactgccatctgctttcattttcccaactattccgtgagggacgcactgtttcccccatttcgcagaggtggaaaccgcttacttagagaggctggaaaccttagggcttgcagctggccagtggccgggtagggatttgaaactgggtctgtctgaacccagagtctgcacttgcctcctaagacaccagcgtgttagccccacctcctcctttacaggcgaataaagggacgcagcctggaaggcccataccaggcagtcctctgcactgccacatctatgccctgcccaatgcatctgggtgtcaggcaccagtcagctctgaggttattgaaattgatcatctaaatctacaccagggcttgagcggctgattaaatctcgattttgctcttaattaaatcctgcctggttgtatgagatggtggaactgggcatgactttgtctgtttctcttctaaagttgtagaaaagttgttatataacttttataatgaaaaaggaaaggctcttctaaatatacaaacaaaagaaatataaaggaaaggtttataaatttgacgacattaaaatgtaatagttctctgtataataaaaaactaaattaaaaggcaactctcaaaattaagaaaacatattcacaacgtatacaaccaaagaagcactaagatctggaatacatgaagagtacctacaagtaatgagaaaatgacagagactcccacttgttttcattttttatttttttatttataaatacatgaaacaagatcttgctctgtcacccaagctgaagtgcagtggcgtgatcatagctcattgcaacctcaatttcctaggctcaagcaatcctcccacctcagcctcctgagtagctgggactacaggtgcataccaccccacccagctattttttaatttttgtagatacggggtctcactatactcatagaccaggctggtctggaactcttgtcctcaagagatcctcggcctcagcctcccaaagtgtagccacagagatgtttttaaatgacaatgtccaaggctgcctgggccatggcaagttccctcacaacacagtaacaccctcactggtgagactgtaacaggcctcacaggaggctgggttagggtaaatgtacctatccttcaatccaaggcttccatgtttgtgaatgtaaccaatggatatatccagagatagcacaaggctattcatcaatgtgatgaacagtagcacacacacaaaataggaaacagcacaaatttccaaatttgttccatgaacaaattatagtataaatgaggtgtaatattccaatggaatcattaaaaatcatgttttggaaaaatgttaaatgacatggaaatatttatgaaatatgattttatgggggaaagcagaatacaaaaaaatacctatatataataattccaatttcgtaaaatatatgtctatacacaggaagaaaagtctgtagaggtattctatatatgaaaatgttggccaggcgcggtggctcacgcctgtaatcccagcactttgggaggctgaagtgggcggatcacctgaggtcaggattttaagactactagcctgaccaacatggtgaaaccccgtctctactataaataccaaattagtcggatgtagtggtgcatgcctgtaatcccagctacctgggaggctgaggcaggagaattgcttaaacccgggaggcgggggttgcagtgagccgagatcatgccattcattgcactccagcctgggcaacaagagcaaaactctgtctcaaaaaaaaagaaaagaaaagagagagagggtgagcgtctaggtctttctttcctgaacacgtcgtgcccatatgcctgttcaagacagatggcatggagtgtgcctgagaggtcaatgcctgttgctctccatggttcaccccaagactgggtcatgtggcttcctgtgcaccccaagactgggtcatgtggcttcctgtgcaccccaaggttctgtagccttgcagcttaaaggaaaggagtttgaatattgtggcaccagacaagcctgaactgaaattccagctctacagcccactgattttcagcaagccactttgccttcccaagccctggtttcctcatctgtaaatggaaagaacaataatagccttgcaaggtcatgtaaggaccacagatattggggaaaaaaacacagagcaggggttcattatacccttcccagggctgctgtctgcctcaggactcagaaaccaggagccaccgtcagcgcagcctgcgtgttcctgccctctgcccacatacctgctgacacgtggattctcaacaccagctgtcacaaactatttttgggatcccaactctaactatcatcccagttttgttgcatgataagcacactgctaagcattttacatttaatcccacagcaatcctatgaggttcacattattagctccacattactcatagggaaactgaggctcagagagattatgcgacctgcccaagttcctacagcaagtcaacggcaacaccagggctcagctcaggccggtctggccctggcctcatgaagccagatgctaacacattcctcgggcccctgtgtccacccctcctctggtggtcagcacagacatggtgaccgtggccctgaaaccatgtctctattaccaatatcatcagactgggcagagctctcccctcccttgcccttattaattgcacctggagactcctgagaaaatggggcttccctccctccccgccgctgctctctgacttaattacttctcctcctggctgtaatgaatgtttctgagcccctgagactgagcttcatcagaagcagctgcctccaggactctagccctgtctccccagccctattcctctgggcccagcccatcgcctctaccctgggacttcagctacaaaaggcatctgggcaggggagactcccagcctctcagcctccctgctactgatggaattcagctcgaagatcagaccttgagaggtcgacccatactgggggttctgaatcctcagtcccccatccagcaatctgtctccaggtcttggagcagacagctcagaatgaccactcttcccagcttcccacatgccacacccctgtggggctggcatgaagaggccatttcttccctttgttcatccaaccaacattcactgggcccctcgtctgtgccagtccttgctccaggcactgagaggaggccagtgcctgttgttctgagcaaaacagacatggcatgtgccctctaagagcttacagtccagcagggaacacagcccaaaacaaacagatgaacagagaactaaaattagcaatagggagggaggaagggggcaaggatggagaacgagtgcttcggtagcagggaggggcagagagcggtgggacatatgcctccatctgtcctgtccagtccccacgccggaagtcctcacagcagtctgctctgcatccctcctaattcagaccaacatggtctactggaccatcacctccaatcacccagggccacagccacacgccatcccactcatccatcactgaaatgaccacagggagaggagaaggtgacccgtgggagccccagagccaccaagtcaggaggaagggcagcagaatgaagacatttcctcctgtttctgcctcttcatccttccaccagggtctcatcccactgccaatcatcaaaataatttccaggtagattaaagagttaaatataaaaataaattgaactgtggaaaacaggacgaaatggaatcatcagacctcttgcggaaagggagctttacgagcgtaaaagctctggaagaaatcacaaaaagaaaggtcaacagccttgcccgcacaagcgttaaatggtgtgcatgtcataaaagcgtaactgaaatcacagatcagaccacctcgctttgccaggctaactttaatttatcctcaattcagctccccggggaagcttccctgaccacttcacctgccctgggttgactgccaccctgagcactccagggcactcaatcctctctcagagcggagttgaaaccatgttgtgatgatttctgtatatttccatccccatggaccatgggcaccttgacattttattgttttgataatctccatggccagcacacagagatatttaacacaaagtagaactcaataacatctttttttctttttagtggatattttctggttctctagcttttttttttctttttcttctttctttctgtctttttttttttgagacggagtatcactctgtcacccaggctggagtgcaatggcaaaatctcggctcattgcaacctccacctcctgggttcaagtgattctcccacctcagcctccggaatagctgggattacaggcatgcaccaacacaccggctaatgtttgtattttcagtagagacagggtttcgccatgttggccaggctggtcttgaactcctgacctcaagtgatctgcccgcctcagcctcccaaagtgctgagattacaagtgtgagccaccgcacccggccctagcattttaattgtaaaaaacacataacaggctgggcgcggtggctcacgcctgtaatcccaagacttcgggaggccaaggcgggcggatcacgaggtcaggagatcaagaccatcctggctaacacggtgaaaccccgtctctgctaaaaatacaaaaaattagccgggcgtggtggcgggcgcctgtagtcccagctactcgggaggctgaggcaggagaatggtgtgaacccaggaggcagagcttgcagtgagctgagatcatgccactgcactccagcctgggtgacagagcaagactccgtctcaaaaacaaacaaacaaacaaacaaaaaacacacataacataaaatttgccatcttaatttttggaggaactgccatactgcttccatagcagccacaccatttcacattcccacccagagtacactaggattccagtttctccacatcctcacaacacttgttgttagccatcctgatgtgtgtgaagcagttttgatttgcatttctcaataactgttttttaaatgaaggaatcaatagactaagaaaaattcagatggcaaatatgacaaagggttaatacaaggccagcatggtggctccacacctataatcccagcactttgggaggctgaggtgagaggatcctttgagctcaggagtttgaggctgcagtgagctatgatcacaccaccgcactccagcctgggagacagaccaagaggctgtctctttaaaaaaaaaaaaaaaaaaaaaaaaaaaaaaaaaaatatatatatatatatatatatatatatatatatatatatatatatatatatatatacacacaaatctataagtaagacattaggctcccccaaaggtaaatggacatgaacagacaagtccactagcaaggaaccataccaacattggcaactaaaaaaggcaaaatgggatgccatgttttacctggtaagatttccaaaataaattaatcaagctcacagatggcaagaatacaggaaaacgggcacactggctggctcgtggctggtgagagtgtacactggcacaactctttgaaaagcagcttctcgacggggcgaggtggctcacacctgtaatcccagcactttgggaggctgaggcgggcagatcacttgaggtcaggagttcgagaccagcctggccaacatggtgaaaccctgtctctactaaaaatacaaaaaattagccaggcacagtggcacacacctgtaatctcagctactcgggaggctaaggcatgagaattgcttgaagccaggaggtggaggttgtagtgagccgagatcgcaccattgcactccagcctgggtgacagagcgagactccatctcaaaaaaaaaaaaaaaaaagaaagaaagaaaagcaacttctcaagactcaagagcattaaaaatattcatgcactctaacccagaaattcagcttctgggcacttgctgaaatattacttctaatggcaaaaaccgcaattacttttgcaccaacctaatacatgcaatcgggagatacaaggcacaaaatgtacaccacagttcatttataatagcaaaaacttggaagcatcataaatctctaataacagcatatttgatataaaattatgaaacattcctacaatgtaacactatgcagtcacctaaaagatgattacgaaatttatgatatgagaaactaggatttaatgttgttttttttttttttttttgagacagagtcttgctctgtcacccaggctggatgcaatgactcgatctcggctcactgcaagcttcgcctcccgggttcacgccattctcctgcctcagtatctccgagtagctgggactacaggcgcccgccaccacgcccggctaattttttgtattttttagtagagacagggtttcaccatggtctcgaactcctcacctcatgatccgcccgcctcggcctcccaaagtgctgggattacaagcgtgagccaccgcgcccggcctaggatttaatgttatgcgggaaagacaggatacaaaatgtcacctgcaataagatctcaactggggccaggcacagtggctcatgcctgtaattccagcactttgggaggctgaggcaggtagatcacctgaggtcaggagttcgagactaccctggccaacatggtgaaaccctgtctctgctaataatacaaaaaattagccaggcattgtggcaggcacctgtaatcccacctatttgggaagctgaggcaggagaaacacttgaacccaggagggagaggttgcagtgagctgagatcttgtcattgcactccagcctgggcaaaaagagtgaaattccatctcaaataaataaataaataagatctcaactgggaaaagaaataagggtagtaagtctatgtaaaactatatggtcaggctggtggatgctgcctctggcagatgggctgtagcaaatgctttttttcttccttttgcttctccatgcttcctctccccacaacatacgtcttcctgaaccagtaatgtcattaaaatatcttgtgtagcctgggcaacatggtgaaactccatctctacaaaaaattggctgggcgtggtggcccatgcccatagtcccagctacctgggaggctgaggctggaggatcactaagcctggtggtcgaggctgcagcgagctgtgattgtgctactgcactctagcctgggcaacacagtgaggccttgtctcaaaagaaaaaaaaaaaaggccgggcgcggtggctcacgcctgtaatcccaacactctgggaggccgaggcagacggatcacgaggtcaggagatggagactaccctgactaacacggtgaaaccccgtctgtactaaaaaagtacaaaaaattagctgggcgtggtggcgggcgcctgtagcccagctactcaggaggctgaggcaggagaatggcgtgaacctgggaggcggagcttgcagtgagccaagactgtgcactgcactccagcctgggcaacagtgcaagactctgtctcaaagaaaaaaaaaaaaaaaaaaacctttaccagatattccctcttctgaatatttatccttcaaaaaaatatttcaacaatataagggaacgttttatgcacaaaagtgctcattacagcatcatttataaccatatataaattggatgataatcaagtgcttaataataggaaactgaggccaggcacggtggatcatgcctgtaatctcagaactttgggaggccgaggcagatggatcacttaaggtcaggagctcgagaccagcttggccaacacggtgaaaccccgtctctactaaaaatacaaggccaggcgcagtggctcatgcctgtaatcccagcactttgggaggccgaggtgggcggatcacctgagggcaggagtttgagaccagcctcagcatggagaaaccccgtcactactaaaaatacaaaattagccgggtgtggtggtgcatgcctgtaattccagctactcgggaggctgaggcaggagaactgcttgaacctgggaggcggaggttgccgtgagctgagatcacgccattgcactccagcctgggcaacaagagcgaaactccatcaaaaaaaataataataattaaaaatacaaaattagtcgggtatggtggcaggcgcctgtaatcccatctattcgggaggctgaggcacgcgaatcacttgatggccatgtgaccacagaagcagattggagtgatgtagccacaagtcaagggctgcccgcaaccacacaggctggaacagggggaggattgtcagaggaagcgtgtctgccttccggcctccagacagtgagaggacacacttctgttgtttaagccaccaatttgtggtgctttgttatggtagccttaggaaatgaatacagaaagtaatatgaaaaatgctgcgccgggcgctgcgacgcacacctgtaatcccagcacttcaggaggccaaggagggtggaatgcttgagcccaggaatttgagaccagcctagtcaacatggcaaaaccctatctctacaaaaaaatacaaaaattagccaggcatgggctgggtgctgtggctcacgcctgtaatcccagcactttgggaggccaaggcgggtggatcacgaggtcaggagatcgagaccaacctggctaacacggtgaaaccccgtctctactaaaaatacaaaaaattagccgggcgtggtggtggtgtctgtagtcccaggtactcgggaggctgaggcagaagaatggcgtgaacccgcgaggcagagcctgcagtgagccgagattgcaccactgcactccagcttgggagacagagcgcaactccatctccaaaaaaaaaaaaaaaaattagccaggcatggtggggcacatctgtcatcccagctactcaggtggctgaggcagaaggatcatttgagcctgggaggcagaggctgcaatgagctgatatcgtgccactgcactccagcctgggcaacagagtgagactctgtcttaaaaaaaaaaaaatgctgtgacatactgataagtgaaaaatcagaaaaattaattctatatacacaataatacagccatgtttttaagtgtaaaaagagcttgaaaagaaatagaccaaaagcaaactgcagctgtatttgtgggccaggtaggttttgtttatccaattttcaacatttttggtaacttctctaagttacttttattttttgaaattatttattaattattattattattattttgagacagggtcctgctctgttgcccaggctggggtgcagtggcacaatctctggtcactgcagcctccaccacctggattcaagtgatcctcccacctcagcctgcccagtagctgggactacaggcatgcgttaccaggcctggctaattttcaaattatttgtagagatgaggtctctctacattacctgggcttgtctcagactcctgggctcaagtgatcctcctgcctcagcctcccaaagtgctgggattacaggcatgggccactacacccagcctgaaaaaaaaattttaaaaaaattataagtatactgtgctgtaaccatcagccccctctgtctgttcccactgccaggcccccctctctctgcctgggaactgttcttatctcccaagtgctcaacacaaatcaaggcactcccttcctcaaaaccctgcagcggctccccaggtctccttaacctacaccccacccctggcctcaagctaccgtcggctttacccttcccctgccccactcacagtaacagtcaagtcagcgaacattgccactttcttggtttctctgtttgagccgcagccaccgtgtaaggtagggagagaagctttctccctactgagaagatggaaggatccccagagtgggagcaaaagtcctgcacaaagtcagcccgaatccagtgattgaggctaggactcgaacctcgcgttttgatccagggtgcggcaagggcgccccattaacgtgtcccgcccgaggatgcctgagccccctcctccgtggctcagcctgaggggagaactccccaccttcgtcccaaataaaacctcctgctcctctcaacgcctttgcccctgattcccccgttaggctgcaccctcactcccccacccacgagctgcgttttcccggaagggttggggtctcgggatccgagacagagccctgcctgggcccaacgaacgggagggcgctggctggggccgggggtggccagggccccgggggaaaggcggtaagcatgagcaagagggtatcaggagtcgccccagcctcgccgccccggggcggttcccactagcacctcgggaggatcccttcactccgccggtccccgcagggcaggcggaccccacgcggccagtccgggactacccgggactacccgagactttgcatcgcgtggccgggccggcatcgccccttggtggcaattgtttgtcattacaacctggggcgcaaagtggaatccctgtcctctatccaccgaggacccctggggtattttggcggctggacctgcgccctgagtccaggaggctcgatattcacccttaggatattttcctgaaccccgataccccacaatctcctatccgcacattaactttaccttgggatatgcaaatattaagtagaaccctatgaaatttacattagttaaccgtttttgtttggtttggtttggtttggttatgtttgagacagagtctcgctctgtcacccacgctggaggcgatctcagctcactgcaacctccgcctcccgggttcaagtgattctcctgcctcagcctcccgagtagctgggaccacagatggttataacaatacctcccatcccacatgcccttccacaaggaggccctgacatctcccatcaagaaatgcagacgggccgggcacggtggctcacgcctgtaatcccagtgctttgggaggcccaggtgggtggatcacttgaggtcaggagttcaagaccagcctgaccaacatggtgaaaccccgtctctactaaaaatacaaaaattagccgggtgtggtggcaggcgcctgtagtcccagctacttgggaggctgaggcaagaggattgcttgaacccaggaggcagaggttgcggtgagctgagatccagccactgcactccagcctgggtgacactccatctcaatgaaaaaaaaaaaaaaaaacgaaaagaagagaaatgcaggcatgcaggcggcgacagtggctcacgcctgtaatcccaacactttgggaggccaaggcagttggatcgcttgagctcaggagtttaagactagctgggcaacatagcaaaactctgtctctacaaaaaaagaaagaaaaaaattatatatatatatgaaagaaatgcagcccatgaccccttcccttgagtctggtgggcttgtgacacacttataaccaataggatgggtcagaagtaatgctacaggactgctaaggttgaactttaaaagacaatgcagcagccaccttttctgctggaccaggtgggcttgaagcctccagctgccctgtaagcagcccaactgccctgaagctgctccaaatcagcctgcccagagagaccactctgagactacgtggagagagagagagagatgcttgtccagcccccagctggacccaggccccacccttgctgtcccagctccagccatcatctgactgcaaccacatgagaaactctgaactagaaccaccaggtaagcccttcctgaattcctcatggagagcatccatgagcaaataaaatggttctttcaagccatggggttttggggtaattttcattttttgagacagtgtctcactctgtcacccaggctggagtgcagtggtgtaatctcagcccactgcaacctccacctcctgggttcaggtgatcctcctacctcagcctcccaagcagctgggaccacatatgtccaccaccagacctggctaatttcttgttttttatttttactttatgctgggtttttttgtttttgttggtttgtttatttgttcatttgttttgagacagggtcttgctctgttgcccaagctggagtgcagtggcgcaatctcagctcactgcaacccccacctcctgggcttaggccatcctcccacctcagccacccgagtagctggaactacaggcgcacaccaccacgcccagctaatttttgtatttttttatagagacaaggttttgccatgttgcccaggctggtctcaaattcctgagctcaagcaatgtacctgcctcagcctcccaaagtgctgggattacaggtatgagccactgcacgtggcctaattttttacagtttctttttttggggtgatgttgttgttgttgtttggttgttttttgttttgttttgagacagagtctgtctctgtcaccaggctggagtgcagtggcatgatctcgactcactgcaacctctgcctcccaggttcaagtgattccccggcctcagcctcctgagtagctgggattacaggcatgcaccaccacgcctggctaacttttttgtatttttagtagagacaggatttcaccatactggccaggctggtctagaactcctgaccttgtgatccacccgccttggcctcccgaagtgctgagattacaggcatgagccactgcgcctggccgggtgttccaattttaaacagggtggtaacacttgagcaaaccctgatggaggttaccatggggatacctgcagaaaatgtcccaagtagaggacacagccagtgccaaggcaaaagtaattgtacctgacatgcttaagctatgtgaagaggtcctcatggctggtgaggagtgagctggctggaggggcaggggcagtaggaaataaggtcaaacaagtgcctggcaatcacaaggacttcgacttttactctcagtgagatggaagccatgagagttcagaacagaggaatgacaccatgggactcacctttcaaaaatcactgaggcagctgtgttgagaatagactctagtgggcaaaaatggaagcaagaaggctacatagaaaaatccaccccttacgaatgcggcttcgaccctatatcccccgcccgcgttcctttaaggccatttaggaagctatttcttcaactcagggtggtatcctggaggaggtgggaaaacattggatattggatatattttatgggtagaatatatactgactaattggacatagggtatgaaaaaaaaaatcaagaatgaccatagattggtttttttgtttttgttttttgagacagagtctcactctgtcgcccaggctggagtgcagtggcaagatctcgtctcactggaacctccacctcccaggttcaagtcattctcctgccttagcctcctgagaagctgggattacagatgcccaccaccacatctggctaatttttgtatttttagtagagacggagtttcaccatgttggccaggctggtctcgaactcctgacttcaggtcatctgcccactttggcctcccaaagtattgggattacaggcatgaggcaccatgcctgaacccacagatttttttttttttttaagaaacagcttttcagccagacacagtggctcacacttgtaatcctagcactttgggaggccaagacaggcggatttcatgggctcaagagttcgagaccagcctgggcaatacgatgaaaccgtgtctctactaaaatgcaaaaaattagccgggcatggcagcatgcacctgcagtcccagctacttgggaggttgaggcaggaaaattgcttgaacctgggaggtggaggttgcagtgagctgagatcaagccactgcacttcaatctgggtgacagagtgagactctgtctcaaaaagaaaagaaaaggaaaaaaaagaaacagggtttcactgtgttgtccaggctgcagtacagtggtgcattcatagctcactgcagcctcaacctccctggctcaagagatcctcctgcctcactcagcctcccaagtagccaggattacaggcatgagtcactacgcccagctgatcatagatttttggctctgagaaaagaggaaactgagctgccatcaactgagatgggaagatgtgagtaaagtagatttggccacagcatgggggaatggcgctctgatttagatgcctggaatgtgagatgcctactacatgtctattatattaggtccaaggggtcgagtaggtagttagagacacagatctgcagttcagaagaatggtctgggctgaaattaaaaacatgacagtcatcagcttagagatggtatttaagtcataaaactacacaggatcccgagagagagaaagtagagaaaaggaccaaggcctgagctctgtggttctccatcaggaagacagcaggagaaagaggaggaccaggaagggagtgtgaggaagagcagcctgaggccaggtgaagggggtatcgaggaggagggagggaggcaaaggtggccaataggcttagggggaggagggctgagaattgacccttagatttagcaatgcagtggtcactggtgaccttgacagtgactctggtaggggtgggggagatggcctaagtggattgcgcctaagggagaacgagagggaggacctggaggcagcaattttgttcgctttttccaggaattttgaaggtaaaaggagcaaagaattggggcaacatttagttgatcccagagtggggttgaggggtggcgggggaggtgaagttagaagttttgttagaggccgggcacggtcgctcacgcctgtaatcccagcactttgggaggctgaggagggcagatcacctaaggtgaggagggcagatcacctaagttcaggagttcaagaccagtctggctaaaatggtgaaaccctgtttctactaaaaatacaaaaaatcagccaggcgtggtggcgcgtgcctgtaatcccagctactcgggaggatgaggcagaagaattgcttgaacccaggaggcagaggttgcagtgagctgagatcacgccattgcactccagcttgggcaacaagagtgaaactccgtctcaaaaaaaaaaaaaagaaaagaagttttgttaagatggaaaataactgtgtttatatgctggtgggaattttgatgatggagcagcagagggaagacttcctggagcaatgctcaggaggaaggaagggatggggcctgtgcaccacgacaggaactggctttagatgacacctgtgctgtccatctacactaacaggtggagagcagagacatgggtgcctatgttttccgagagcttcctttttcttttctttttttatttttgagaaaagcctcactctgttgcccacgttggagtgcagtggcgtggtcatagcttattgcatgcagcctcaacctcccaggctcaagcaatcctcccacctccgcgtcctgagtagctggaactacacatgcacaccattatgcccagcttgtagttgtaaatttaaagtgagaccaggcgtcgaggttgtatgtctttctctagccatcatgcatgctcagctgtgtagtgcaggcacaggatagatggaaggtggatttgatcagggtttctgtcacatgagcatgacaaagccggaggactgccctgtgtctgcctttggttgggcctgggtgtatctgtgtgcctttgtagataagggcagatggcactgtcaagaggtctgtgctactctgggtgtgtcaaagtgtcctgtagctgtcaatggccacagctgggtgtgtttttgtgttcttggtgtcttttcacgtctatgtccatgtgttcctatatgacacagtcgctgagaatgcctgagaatgcctaagtgtgcactttttttttttttttttgagactgagtcttgctctgtcacacaggctggagtgcagtggtgtgatcttggctcaccgcgacctccacctcccaggttcagcctcccgagtagctgggattacaggtgtcagccaccacacctggctaatttttgtatttttttttttagcagggacaggtcttcgctacgttggccaggctggtctcaaactcctgacctcaagtgatccgcccgcctcagcctcccaaagtgctgggattataggcatgagccaccacacctggcctatgtgagtgcacaattctgtatccaaacgtgtatgagtggatctgtgtacctctgtacacctgtatggtgtacaggggcattcctctacgtacagatgagtgtctgtgtgactgtggctggtgtgggtctccaagtttgtctactgtgtctctttgtacacccgtgtgtctacacatcgtttatctgtttgcatctcaatgctatggggctctgtatttgtgtactgtgcatgtttgtgtgtgtgtctcccctcaggagctgtgatgtggtactgtcaaatgtcaaccccagcccctcaccctggccaattcctgtcacattcatgccctgctgggctgagatgcggccaagaagggctgtattgggagggaaagccttgggcttaaacctggctactgtgctcggggcccaggacccttctgggtggaagttatgtctctgctcccaggatctccaagacccaagcctggtgagaagctgggcccctgaacctgggcacaatgacaacaggctctgctctaacaaaataacacccacctttaaaggaagaaaaatgtgagctggacccatacatcaacaatgatcctgtaggccttcaactcagaggggtggggctgggtaggagtgctgaccccagacactcacactcttctcctccagaaagcagggccagtccccaaccagaggagaggtggaggggacacagtggccccagggtcaatgggcctggagttaatcatctactctggtatctctgggccccattggctgcctggggacacggccctctgggatgaagcccaaaggagtcagaagccgcttcccagcccatttccacctcataggctcaggggcaatggagctgattcagtcagcagggactgaattgggtggatccctaggaagcccccatctgagggagataccagtcctgccctcagggagccccagtctgagtcaaagaggacagagacaagaaggaattctgagtggagaggggtcagcaggggtggcctgctgtgatgaagagctggccttgcagcctagggaaagagaagcacatttgggttgaaggagtttggagaggaaaactattatgcccctggaggctaagacctcctcctccagtggattctgagaagtgtgtgtgtggccgggcctgagagtaaagagggaagagaaagaaggccctggaggtggccccaccaggtagggggtgcagcccctccacgccattgcttcatgctttgccttggaacccaagatttctaagtgggaaaacaaaaaaactcaatgaggaggtcctatgtcagcccctccttccactacagagtctcccccccgggacagtgtgtccgaggggtgggggactgcggggaagatcccagaaacgggtaagcgcactcactcggcctcccctggagactcctcaggagggaagtagcccaagccctgctccccaaaaaggcagagccccaggtgtcaggactccagcatggggagacaaaaccacgtgcaagaaagcagggaggagcaggggtaggaactgagggtgcttagggtctggccatgccactgacgagctgtgtgaccttggccaggtcacctcccctctacaacaacagagggtcctctttccccctctacaacaacagagggtctgactggatcagagtgtacccaagggcaggatgtgtgcagctgacagtgcccagcacatggacacagtatgaagtaacattgaatcatatcctgtgaatgttttcaagcctttcaactcctttccaaaacttgcttaacagcatggatctggagcagaactgcttcctagaccagctccacggcttgtgagctgagtgaccctgatcctcacatatttctgtacctccattttctcatctgtaaaatgggaataatgataatagctatcctggagtcactgagaggattaaatgaatgactatttgtgaagtcctttgcatagtgcctagcattcgacatgtgttagctattcctctaccacacagaaggctttgcttggtgctagggtatctttaacacatggcacctgctaaccttccatgttaccaagaaagcaggcaagctatgcagatggaatataatggaatgtaataacattgttttcctctcacttgattcttttttaattttgattttaattttaattttaatttttttgagacagggtctcattctgtcgcccagacgggagtgcagtggcacagtctcagttcaccgcaatctcctcctcccaggctcaagtgattctctggcctcctgagtagctgggattacagaaacatgccactactgcctggctaatttttgtatttttagtagagatggggtttcaccatgttggccaggctggtcttgaacttctgacctcaaatgacccacccgcctcctcacttgattcttaaggcttatggcaagtgatactggcctagttacagacctaacatggataaactttaagtttaaaaaggttaaagagggccgggcgtggtggctcacgcctgtaatcccagcactttgggaggctgaggcaggtggatcacgaggtcaggagtttgagacaatcctggccaacatggtgaaaccctgtctctactaaaaatacaaagattagccgggtgtgatggtgtctgcctgtaatccctgctactcaggaggctgaggcaggagaatcgcttgaacccagaaggcggggattacagtgagccgagatcgcaacactgcactccagcctgggcaatagggtgggactccatctcaaacaaacaaacaaacaaaaaaaaaaaaaaaaaaaagggttacagaggtcgagtgaagtagctcacacctgtaatcccagcaccttgggaggcagaagtgggaggactgcttgagctcaggagttcacgaacagtctgggcaacatggtgaacacccgtcttcaaaaaaaataatttttttttaaatcagctgggcatggtggtgtgcatttgtggtcccagctactagggagactgaggcaggaggatcatttgaacctgggaggtggaggctgcagtgagctatgattgcaccactgtactgcagcctgggcaacaacagagtgagaccctatctcaaaaaccaaaataaaaaactctattttattttatttttaccagatgtgatattcgataaagaaaagcattaacactaaagtattataagttttgaggggtgttttgaggatatcacagaattcctcaagctggtacccagtgactggagtttggcaaaccctggtaacctcatggtcattcattaggatcttttttgagctcaggcaacaggacagacaaggccagcaccacccgcccccgccctcccactgccccccttcttctactctttccagcgccctccttccagccccctgcccagccctgtgctcaaagccacctacagtcccttcttctctggtcagaatgccaatcatccaaggccctgcagactcccaaagccgcccctggaacctaccttggcagcagattaaagacaacccgccacatttagtctcggccccatgaccgatagtgggttcagttcctccaggggcgggggagcctagtggccccgccccctgactcatggcctgaccctcctcaaacgcacccagaggagactcctggtcccctgtccggaccccgccccgaccaggtccagccccgcccaacggcaagttaagagccccccagtgccagacgctccagacagactgccactcttggggggcaagagttggttgtcgtcatggcgacggcgctgatggctgtggttctgcgggcagctgctgtagccccgaggctgagaggccggggaggcactgggggcgcccgaaggctgagctgtggcgcgcggcggcgggcggcgaggggcaccagcccggggcgccggctcagcaccgcctggtcgcagccccagcccccgcccgaggagtacgcgggcgcggacgacgtctcccagtcgcccgtcgccgaggagccgtcgtgggtgccgagtcccaggcccccggtgccccacgagtccccagagcctccttcgggccgctcgctggtgcagcgggacatccaggccttcctgaaccagtgcggggccagccctggggaggcgcgccactggctcacgcagttccagacctgccatcactccgcggacaagcccttcgccgtcatcgaggtgagcggagcccggcgtgggccgtgacgcagcgaggggatggggttgtgcggccacctgtcctcaggcatggcaggatacgctgcgggctctgcgcagcggaagcgggaaggagcccggcagggcccagaccagcgccgccgggaatgggagaggccgtaagctcctccggaagcctcccgcccagcccgagtgaggatcctgggggaccccacccgccaggtgtgatgctctgaagaaggcccccaacatgggcgcagttaggggttcagaaggacctggacaggagccgcttgcactgcccctcccccaaagatgtcccggagtccaaggtcggagggaggagggcgggaggtaccccagcgtgagacaagggagtggcaagacccaacggggcaaagggcggagcaggtgggcactggtggccagaactgggtcctgacagcttctggaagggtagggtcaccgagacggccctgcaggccaggctgtgggagccagcggctcaggtccgtgtcacgctccttgaaagcccactcctccgcaggtggacgaggaggtgctcaagtgccagcagggcgtatccagtctggcctttgccctggccttcttgcagcgcatggacatgaagccgctggtggtcctggggctgccggcccctacggctccctcgggctgtctttccttctgggaggccaaggcgcagctggccaagagctgcaaggtgctggtagacgcgcttcgacacaacgccgccgctgctgtgccattttttggcggcgggtctgtgctacgcgctgccgagccggctccccatgccaggtgagtgcccgccctgcccgcccaggcgtcctcagagcgtgctactctgcccgccctgccccgtccggcaggcctggagggggccctctcgagcaccacgtctggcccacagctacggcggcatcgtctcggtggagacagacctgctgcagtggtgcctggagtcgggcagcatccccatcctgtgccccatcggggagacggccgcgcgccgctccgtgcttctcgactccctggaggtgaccgcgtcgctggccaaggcgctgcggcccaccaaaatcatcttcctcaataacacaggcggcctgcgcgacagcagtcataaggtgcggccctttctttcaccttcccccacgccggcgatccgggccttctcttgcgcccctcgcacttctccccgacgggccgcagactcactagcaagccgggtgggtagaaaagcctaagggagtataggggaggagttcagccctgggtgcccagatctgcgccctccctggctaaggactccgggcggaagtaaggataaaggggtcagagaaaagagaggtccgtgggggtaggggggcagtccgtgccggctgtgggccaggctcacccgctgactccggacacaggtcctgagtaacgtgaacctgcccgccgacctggacctggtgtgcaacgccgagtgggtgagcacaaaagaacggcagcagatgcggctcatcgtggacgtgctcagccgcctgccccaccactcctcggccgtcatcaccgccgctagcacgctgctcactgagctctttagcaacaagggtgagggcggtgggcgggccggggactgggtcccgggagtgagtactggccggggctgggtgtctgcggtcaggaggagcggcttctcctcctgtccaggagccgtagggggaggcggggggtgtcacagcaatggctcctgctgctgccgaaacccgggggaggtgagagaggaggagacccagtgtactggaagggaactccgaaggaattaaaggaatgggcgggactaggggggagaaggaggggccccccggtgggcggggccaggggcgggaccataagggaggtgttcgaccgggagagatgggcggggcttaggtgggtgggccgggtcagcggcgggagacagacttcaaggagcgaggcaagactaacggaagtgggtggggctccaggcgacaggaggaacttggggcacaatctctgcctggggaaagcatctccttgaatgaaaatcacagacaaatctatgcagaccactgaaatcatttcactgtggaggtctcccaaagacggaaattgtcccaccagcgcctgtcctacctgcagtccccaccaggctgcgcaaacggccctccagccagactagcccctccccatcctcctccagggtccgggaccctgttcaagaacgccgagcgaatgctacgggtgcgcagcctggacaagctggaccagggccgtctagtggacctggtcaacgccagcttcggcaagaagctcagggacgactacctggcctcgctgcgcccgcggctgcactccatctacgtctccgaggggtaagcctgcggaccccagagggcggggtctggggggcagtcgggcagcttcggaccaaggagaggtcccagcctgccgctctcccgctgcgccaggtacaacgccgccgccattctgaccatggagcccgtcctggggggcaccccgtacctggacaaatttgtggtgagctccagccgccagggccaaggctccggccagatgctgtgggagtgcctgcggcgggaccttcagacacttttctggcgctcccgggtcaccaaccccatcaatccctggtaggtcctgccactcccagctctgggctgggccctgacttccctcccctctcccacccttgccaaccatgccaagaaggctgggcttcctcttcttccactggtctccctttcactacctcccaggggcagaacacacagaaagcctgagatttcccgagttaaagcatgcttaacactccttttctggcagcaagtgacacctcctaagccccacgcagcccacctctcacaggggcctgaggaatcctaacccttcagggtctattggaggcctgcggcgcctccagtggaacatccctcctctctccttcagtaactaccccctcacccctacaccctgctctgtgagcactaggaagtgagcaagaaccctcctctttgctgcacagccaaggcagtgtggagagcaaagcacccgctcccttcctgtgtgcgcctggcaaggtacctaacttctctgagccttagctgcttctctgtgagctgagcatcacaatgccaggctcaggcctctgctgtgaggataaaatgagataacacacagcaggaccaagctgggtgcccagcatgcagtaggtcctcaatcaatgttttttaaagacagaaccagtgagtaatgaacactggccttgccctaaaaactgtttcctacatcacctccccacacccaggtacttcaaacacagtgatggcagcttctccaacaagcagtggatcttcttctggtttggcctggctgatatccgggactcctatgagttggtcaaccacgccaagggactgccagactcctttcacaagccagcttctgacccaggcagctgaccctcaccatggacactacaggccctggaatggccagggtggaccaaaagccatgccagctgggcatgaccccaggcagccagccacaggctgaagggggcttgttggctgagtgatctgcagaggagaaagcagccccagctctgcccagaggaggcgctgaagtgggacaagcacaggaaagaaggggaccagtctaggaccccaactcgactcactctaaagctacaaccaaatggccttcgattttcaacctggggattaggggaggggagggtgccttccagggctctactcaggactaaccctaagggtgagctagtttctgtgcctctgtgctatgttttgaggctcccttacccaaaataatacccctgcctgcgtgatattctaccattcattttaattcctttgggtcttgcagtttttcaggaggccttgattaaaatgcaaatacttgtctgagagtcagcttacacttgaaagaaaattagaagtgaccccgtgggagcaagattttttttttttttttaaagacaggatcttgctctgttaccaaggctagagtacagtggtgcaatcacagctcactgcagccttgacctcccaggctcaagcaatcctcccatgtcagcctcctaaataagctggtaccacaggcatgcaccgccacacctggatcttttttttttggtagagacgaggtctcactatgttgccaaggctgctctcaaactcctgggctcaagcaatcctccctgcttggcctcccaaaatgctaggattacaggctgggagcaagatcttgagggctggggaatcaggggactcctggagggagtagaagacttctatgatgaatgctgccaccatctccctcccagagattaggaagcatcctcccttccacagaccaggccacagcagccccagctccccttgcctgtgagtgcctccacccacagctccctttctaggctgggctcacagccagacccaggcatcagtggcggaccgtttacctgcaagagcccagagaagttaaaagatggctttggcttaaaagctcaaacttggacgttttcccctaggccctactagtggttgtgtccagtctctacaggactcgatgggcagaaatccaaagcccaggggtttcatttgacattttttgaagctccataatgtagcaggcaccataccggctgctgctggggtgactttctggcagacacatagacaagaagggagaaggtcgccggatgcgatgactcacgcctgtaatcccagcactttaggaggccgaggcgggtggatcacgaggtgaggagatcgagaccatcttggctaacacagtgaaaccccatctctactaaaaatacaaaaaattagctgggcgtggtggcgggcgcctgtagtcccagctactcaggaggctgaggcaggagaatggcgtgaacctgggaggcggagcttgcagtgagccaagaccgcaccactgcactccagcctgggcgacagagcgagactccgtctcaaaaaaaaaaaaaattagccaggcatggtggcgggcacctgtaatcccagctactcaggaggctgaggcaggagaatcacttgaacccgggaggcagaggttgcagtgagccgagatcacaccacagcactccagcctgggtgacagtgagactctgtctcaaaaaaaacaaaaaacaaacaaacaaacaaaaccgtagtcccagctactcgggaggctgaggcaggagaatggcatgaacccgggaagcggagcttgcagtgagcagagatcacgccacagcactccagcctaggtgacagagcaagactccgtctcaaaaaaaaagggagaaggtcaacagggagaccatcatggcacagtaggggctggaatagagcagcctctgtctcccctcaggagatgggtcacagtgagtacatatctggacttcaccattagacagacctgacctggaatccagctctgtgggctggatttgctctgtggcttgaccgaaactgcttatcctctctgagcctccatttccttcatgtataaagtgtaaaatattccacttcacagtggacacttcacagttctctccctctagctgctctcaccaaagatgtcttcataagaaccagctccaaatggggagaaaaagacaacctacaacaagagggactgaggtgagggattgaaagcatatagtacaatgaggattttgagattcttgaaaaagagagccactgggcacagtggcttatgcctgtagtcccagcactttgggaggctgaggctgaggctggagaatcacttgagccaaggagtctgaaaccagcctggacaacaaagtgagaccttgtctctaaaaaataaagaagtgaaaaattaaaaaaaaaaagaaagagagagagccaaagaactgtgggaaatcttggaacaggggaaagatcacgggaggcccaaggtggggcttgaccagatctagtgtttcaagaaacccaagatcaatcccagccaatggcagagttccctgttggggagaacagaaaagcaaaaccaaatgtctatataaaatgtttatttttggaggactgtgtggtctggtgtttgggagggaactccacccccaccaggccaaccatggagctagaaacagagacagcaggaagggcaaagctggccactgcctgctccaccccttcacagcccagagcagaacagggtctgctctactctcaaggtgagtgacagagagccggtactgtttctgcccctggcataccctgagaacccatgtgacttctgtagtgctcagcccctgtgcccttcctgggcctgatccacatgtgtcaacacacgcactccctctcacagtctccaaacagcactgcagagcctagctgcatctgccaggttcaaagaggaatttttcacatttgctcacttccaatctccatcttccttcctctgtctcccactctcccactctcagtagccgcatcccagccctgccatactcccttctcagggacaggagactcagtgggcagctggcctcagctctcctaacaggaaaaaaacctgtacagcattagtgccagggctcctgccctcccaagcgctgagcccagaaatttggacaaatgagctgcctcttaactgcaaaaaacaattttaaaaaagcaaaagatcaaacaaacagaccaaaaagcataaataaacagcagctgggccagcaaggaggaaggcagggtgaccctcagtggctccctgtgcccatctcagcctcttgccataaaactcagccatcagtggccaggatgacagcagttccgaagatgcccacactctctccaaggagcttcatctggttccagaactcaacacgccgcgtgttgtgccagtaagcaacattgccatcaatgagcagcatgacagggggcagcagtacagccaggatctgggcagcgagggtcacgtagtagcctgacagaaaggccagggccaggatgccatacagcacgaagaacagctggatcatcagctcccctcctgggagatggttcagatacgccagccggtcctccttgctgtgctgcagtgagtaggcctggagacataacatcctctaagactctccaacaggctcagaagcctgtctggggtaaaccacccctgagatggcacctgcaaatgagtccctgcagatgggcttctgactcccctcttggactggggaacctctgaaagtagggcctttgtctccccctcggactatggagccccaggagattagggcccatgtctcccctcaccctaggggctatgaaggaagtgtatttccacagtcagactagagctcccacctctgaatatgggagcccacacagagagctgtacagagatatactcggtaattaagataagacctaatggcctggcgcctgtccatgtctccagtcaccctggcctcccctagcaccagggagaaccataagtggctaccctagagctctcatcagctctagggggcagagtcccagctggggcctgacccccaccaaacctctcctttatccccttctagtcctttgggggctggagccatgagagaatcaccccatcttgttctcctggctctcagggttgaaatttaatggccagtctacctcgtggcaacactgttggaggaagggcctctcaacaggcatttggagggcccctgaggcctagaagctggccagggcaattcccagggaactgggccatcaggaactgcactcagggcctcgttctgtgtctaccttcctggggttctgccatgcctagactcacagttcactcccagccaggcacctccaaccaacagtcccccaacataccacacagatgaggtagatacccaggaacacctggccggtggactgcagggagcggctgcgaggtttccggcggtacagctccccagcaccgctggccaacacaagaaagccgccgatgatggcaactgtgcgcgagtacatacggacctaggccggggtaaggggaccccagtcaagaactgcagccgccacatctctcctggcttcccagagtgtagaaccacccctctctacacatcccattccatctgatgaaccctcttacatttccaagcttggtgggcaggtgcaacagagacagatcattctttttatatatatatagaagtagaaactgaggcccagagggttaagaaaactgtcaggtctggccaggcgcagtggctcacgcctgtaatcccagcactttgggaggccgaggcaggtggatcaccctgaggtcaggagtttgagactagcctggccaacatgaggaaaccctgtctactgaaaatacaaaaattagtcgggcgtggggaagggcgcctgtaatcccaactacttgggagactgaggcaggagaatcgtttgaacctggaaggcggaggttgcagtgagttgagacagcgtcactgcactccagcctgggcgacggagagagactctgtttcaaaaaacaacaacaaaaaagaaaactggcaggtcctacctgccagtaagtggcagaacccagacacaatgtgtttctcccttccccactctcagatctgtagactctaatcttggtgttctttattctacatggcatgggatctatgccacaaaaacattgatcttgctgccctgtagctgttcacacatcttcctcccctaagggtctgacagtctcttcctcaaggacagtgcctttgtccaaccttatctccagcctgcagggcctggcacaggttctggcttaaatgctatactaacagtaattacattttcataaaatttattttatgaaaactaggtactctccaaggtcctttgtaccccatgagtctgagattactaaactaacagtttaaaagattctgggaaccaggtgaccggggttctggtcccaccagtatcctgtattgtggctttgggaaagtctgtttcccatctctagacctcagtttccacactttgaagaggaagtttgtgtggtctctaagatccatttctgcgctctgtaatctccataagccaaggggttcgaacctcccaggcttcacactgtgcagctggccagcaccattcatcgcccaccaacagccctgggcattggcctctgattccccgtcacccagagggaagacccttttggggccgaggcgctcaccttcagccagtccccgtagtggacgtagcccccgatgtaggcggcgtaggtgctaatggccaattggagtgcggcccccagcgcgaaccagcgccgcttcacgccaaaggacatgaaactagcgcacagcacggctgcccccatgtcgaaatacaggtaaggcactgggatgtcgggcttcctgcgagccgggagtggggaagcaacgaggacagaatgaagcggtgggggaagaagcttgagaccccttgagttcccacaggctccactgctcccccaaaccagactcccctcccatgggcaggaccgccctaccagatttggtccgacacccagaccagaacccctcccagggaggtcccaattcctcccagttcaagggtcccgacttctagcccccaatttcttgcccacatcaccgccccctgccgcgtttagcggctgcgtaggcctgctcaccggcgtgcctcagccctctcagcgtacagcatgagctggctgaagcagccccaaaaggggcagcgtgtgagcagcaccgaacccaactgcatgatcagctgcaacatccaccgtctcgaacctatcttcgacgccatcttgggaaagggcagtccgctgcggcctcaccccagtcagagaagcaggcgcggggatgggacacgcagcttccgggtcaagcgctttttctttttcctcccggaaacaacggtgtcattctctagttccggatctaaggtgacccagttgcgaagtccagccttctcgtctgctcatggagccttcagggccatatttgtccctgcgaatttgaaaactagactagaggaaggaacagtgggttcaggatagcagaagtcttggaccgtagtatgatgtattgaagcaaactggtctttgaatgcagcccgatcagggccctaatcctgattccaaccctgtgtgattctgggcacatcacctaaactttatgagactcatcatgaaatggggataattacacctacctcagagttgtgaactttttttttcttttttttttgttttgttttgtttttgagacggagtctcactctgtcgcctaggctggagtgcaatggcacgatcttggctcactgtaacctccgcaacctgggttcaagcgattctcctgcctcagcctcctgagtagctgagactacaggctctcgccaccacgcccggctaattttttgtatttttagtagagacggagtttcaccgtcttagccaggatggtctcgatctcctgacttcgtgatccgcccgcctcggcctcccaaagtgctgggattacaggcatgagccaccgcgccaggccagagttgtgaactttaaatgtgacaaggtcggtcctagtacatagtagtggttcaataaatgatacacataacgcaccagaggaaacccccgtttctgttaagatcaaagtaaggggtcctcctggctcaaagtcacctctttgggtttgccttttgcctgtgccctgagagaaaaaggagatctgaacatctgggacatctcaagtcagtccatttctccagctgccatgctcccgctgtaacccaaattgtcatactttgtcagtttaattgcagcagacatccaggtggtctctgcattcccctccagtgtgttctcagccccttctcccacgccccacccgtttatatgttctcataacatcagctaccttcctttgaatcacttggcacggtggcaattagatagatagatagatatagatacacacgcacacacacacacacacacatatatatatatctgctttacatatatatgctttttttttatttttgagacagggtctcactgtgtcacccaggctggagtgcagtggtgcgatcttggctcactacagcctacacctcccaggttcaagcgattctcctgcctcagcttcccaagtagctgggattactggcgcttgccaccacacccggctaatttttatttttagtggagacagggtttcaccatgttggccaggctgctctcgaactcctaacctcaagcgatccaaccgccttggcctcccaaagcgctaggattacaggcgtgagacaccgcacccagccaatatatttgtgattgttttattgacaatcttcccctactagatcgcaagctccctaagcacaaacacggtgcctgggtttctgtttactgtttacagatgctccttgacttgtgatggagttatatcctgataaacccatcataggttgaaaatactgtaagttgaaaatgtgtggctgactggaagctgtggcttgctgacactgcccagcattgtaagagaaatacagtttccactgaatgcagatctgctttcgcaccaatgtaaagttgaaaactccaatgctgggaaccatctgtagtatacaggatgccctcaggacctagtatacaggatgccctcaggaaatatgtgctgtacagataaatgaaaaggtgttgggctgggcgcggtggctaacgcctgtgatcccagcactttaggaggccgagtcgggtggatcacgaggtcaggagttcaagaccagcctggccaagatggtgaaaccccgtctctactaaaaatacaaaaattagccagacgtgatggctgtaatcccagctactccgggcgcctgtagtcccagctacttgggaggctgaggcaggagaatcgcttgaacctgggcggcggaccttgcagtgagccgagatcacgccactgcactccagcctgggcgacagattgagagactctgtctcaaaaaaaaaaaaaaaattcccaccaggccgggtgtggtggctcacgcctattatcccagcagtttgggaggccaagtggggggttggatcacctgaggttaggggttcgagaccagcgtggccaacatggtgaaaacccatctctactaaagatacaaaaaattaggctgggcacggtggctcatgcctgtaatcccagcactttgggaggccaaggatcacgaggtcaggagatcgagaccatcctgactaacacagtgaaaccccgtctctactaaaaatacaaaaaaaattagccaggagtggtggcaggcgcctgcagtcccagctactcgggaggctgaggcaggtgaatagcgtgaacacaggaggcagagcttacagtgagccgagatcgcgccactgcactccagcctgggtgacaaggtgagacaacatctcaaaaaaaaaaaaaaaaaaaaaaagccaggcatggtgggaggcacctgtaattccagctacttgggaggctgaggcaggagaattgcttgaatctgggagacggaggttggagtgagccaagttcgcgccattgcactccagcctgggcgacaagagcgaaactcttgtctcaaaaaaaaaaaaaaattcccaaccagccagtgaaaggtgggcaataaaaccccttttcacatttcattttaaaccggccactagggtcgggcatggtggctcacacctgtaatcccagaactttggaaggcagaggcacgggtggatcacttgaggccagaagttcgagaccagcctggccaacatggcaaaaccccatctctactaaaaattagctgggcatggtggcgggagcctgtgatcccaactattcaggaggctgaggcagaaggatcgcttgaacctgggaggaggtagttgcagtgagtcgagatcgcaccactgcactccaggctggatgacagagcaagactctatctcataaataaacaaacacagtcactaggataaggtctgggtaaatcagaaagaccatgagaagccaggcatggtggcccacatctgtaatccagctactcaggaggttgaggcaagaggattcctcgaggagtttgaggctgcattgagctatgattgcactactgcactccaccctgggtgacaaagcaagacccccatctctaaaaagtaaaaaaacacgagagaggaacatatagatgcaaagaactagggaatgagattgtatacgtgtatgttggagggtggggaggtctctaggcaaggagaatgagaaaaagtctgggttaaaggtaattttgtctatctctacccaccagtgacaaccacacaaaacaaatttcctttaccacaatataggcacatagtacagaatcaactttccagttggttttatttttccagtctcctcacctctccgtttcaaatggctgaggtgtacagccctaaagtgttgacgaggaccagaaccaggattgtgtacaacatgtccataaaatagtcctaggagtctgcctgggttgtccctataggcacaatgccccaccctcccatcataaccttagcaagcagtttccaatcaagtctccagcagcagtggccagggacttgtgtcagggggaggggaagattggattgaggaagcttgccttggtacccactgcgccccttctcagggctgaagtccctctctaccttttcctgctctttcctctttcccagagggatactgagaagggaaggacctggggccaaatcctcatttctagggttgggacagatgctggcatgctatcaggccagaagagggggatgggtgggtggcctggcccctgagaaatgaacacagccatttgtccctgtggtccccccactcccagttcctcctacccctgcctagtgttctgtgcgagagacgagtgaggggagaagaaaaggcacacatacaatacctttaagggtaaacaagctttatcccacataaatggcaatgcagatataataagcaaatgatatagtaagcaagttgcaatgggaaggggagaaaggaaaagagatatatgtatttatactcaccagactatggaggattcaccaccagactgggaagcaacagcaacagcctgggctcgagagtcggacactgcactcaccagactatggcggattcaccaccagactaggaaacaacagcctgggctccagagtcggccactcgtccgtgcacagacgaggagaggtctcatgaagcttcggcacaatctaggaccctagctcttttgtaatgagttgtttggcatgagctccaggcacgagggcccttcatgaccaggctcaaggaacataaaaaggtcaacttgtttttgcgattgtctgttgtttttcaataactaacatataggaatagattgaaatagagatttatctgaaacagcgctggatgaatgcctcaaggggctcacacaacctgttccgggacttggtgaccattgtttgtgtccatgttcaattgagttcaaatttaatatttaacttttcctccacatttggcctcaatctgatactcaactgtaggaaaatactcttacggatacacagggaagccacaattgatatagattacagatacagggtaagcacaggagaactaaaagcataattaataaaaaccacacccctcatggctttgcaaggagattcatattgtgagaattgtcagggatatacacataacattcaggatgcagtaaggggcaaacctttccttgggctgcagtaagcaaacctaatgccatttgactttgcaacatgacagtacacagctgagcaaatttatctgattacaacataagttccatgctactatcattaagagctttttctacatgtaagctgaatgtttgaatttgttgctgaagcaggattgtaccggtggcaggggagaatactgtgatagggtaccgtcaccagggagtccggcgcattcataaccagcaatgtttgtaagcatctagattactggggagagaaatattatcccagatggtgaatggaattaatggccacccccaagtgtgtctccccgtccaagcaggtattgccacctgtaggattcgcatacctagagggccccccagggaacaggaagagttctcctataattgtatcgctgtaatgtgtaattgaagtaacaaaggtgctgtgttttgtttgggcaagggcaaaaatagactgtttggttaaaagaagtccaggttggatttcaagtgttatcccgggccaggcgcggtggctcacacctgcaatcccagcactttgggaggccgaggagggcagatcacctgaactcaggagtttgacatcagcctgggcaatatggtgaaaccccgtctctactaaaaatacaaaaaattagccaggcgtggcgacatgcacctataatcccagctacttgggaggctgaggcaggagagtcgcttgaacccaggaggcagaggttgcactgagccaagatcgtgccactgcactccagcctgggcgacagagagacactctggctcaaaaaatcaaaacaaaaccaagtgttatcccactcccattggtattggcatatccattcagaaatgttagcagggacaattctccaaggtagcccattcccagcggcctctggcaactcaacacagagccagcactgactgcagttggcttctattgcagcagtggctacccagttgatgaactcattctcagcctcagacatggtgatccaggtgctgattactagcagacaggttattctctgtagtaacaaaaatggaggggaacatgatactgtttttcatctttaggaaattgtactgtgccttcatattctgctccaatagctacaaggtcagcagtcttaggggcaggatctgatggacactgtacccatattttagctccaggatttaagttgcccactctggtggacctgaatgttccgttctatatgttgtttctattggggtggaaatttcctcgggggttgttgacaagataccactaacaattgagcaacctgcatctgcggttttatagcaaaagaatctggagtggtattgtataaaatgacctttaactctccccggtaatcactatcaattatagcaccatacattataatgcctctcattgcaaggtttgaccatgttgtaatccattcatccgcattcaagtttgcagttatggtggaaattttggcctgttgatctgcctgctgattaaatagtctgtcaagaaaaagcagagacgcatgagcaccaacatggcaaacagagataatggtagtgtgcgcaaggattcagatatcttcccagtattgttttccccaaacctctttattcccaattaaccatttgtttcgttgccactggggcatcctagtagtgagaccgtttgctactgaccaagtttttctacaagtgacaaatccctctggcctcctcctgaagagcttcgaggacggctaccaattcagccagctggctgctcccaccacttccttcatcagaaccggtgagttttgggagaactcatgacccaagtcataatcataaagacatcatggttgaagcagaggtgctccgtttccagcaaagcccaacagcaagctaacaatttcttgaaaggggtataagctttgccggcctctggcagcttccaggtccaaaactccaaagataccctcttcccatcttgtttctgcctaaggctccaattagcatgttgatttaggacagttacttgcagttctactgggccatcaccatagggaccacagatctagggtcagttgcactgcttgtttagcttgttcaaaagccatggtctctttctctccccagtgaaagtcatagcgttttctaatgactgcatgcagaggttgtaaaatgttacccaaatggggaatatgacgtttccagaatccaaacaagccaatttctgggcttcctttttattggtaggggttgcaaattctagtattttagccttagcctttggtaaaacggattatttcccttattccataggatgccaaggaatttgtttgtgcaggtccttgaattttactagggttaatttcccatctttgagataggagctgggtttgtacctgctccaaaccctggctgactacttcttcagtacttctacttccagtacactgactgggccactcaaacagatgcttttttcatcaataggctgatagctttgagcctgatcagtcaagacataggcctggcattgggccaggaccagtctggaagtcagattagcattttccttttccagcttacatttctcctgtagcaaccagtccctatcttgacacattaacttataagcagtaagcaagcaccatccacgcagggaaattccctcagcatcccctttaccaactgggattccctgcagcacttcacgcacaaaggttcaaattgcactaatttagattcccaattttcacaaaggccaattcccttggaccactcaatggccacggggaagaactgggggagttcccatccttggatatgggaagtctccaagctcccagcctggtccttgcagccgaaaaatggcatgctttttctttcggattctgtttgtgacaccaaaaatgttctgtgtgagagacgcatgaggggagaagaaaaggtgcacacacaaaatacctttaagggtaaactagctttatcccatgtaaatggcaatgcagatataataagcgaatgatataagcaaattaatataataagcaaatgatacaataagcaaattgcaataggaaggggagaagggaaaagagatatatatatttacactcaccagactatggaggattcaccaccagtctgggaagcaacagcctgggctccagagtcggccactcgtccgtgcacagacgaggagaggtctcatgaagcttcggcgcagtctgggaccctagctcttttgtaacgagttgtttggcatgagctccagtcacaagggcccttcgtgactgggctcaaggaacacaaaaaggtcaacttgtttttgcgagtgtctattgtttttcaataactaacgtataggaatagattgaaatagagatttctccgaaacagtgctggatgaatgcctcaagggctcacacaacctgttccaggacttggtgaccattgtttgtgtccatgttcaactgagttcaaatttaatatttaacttttcctcagacaactgaggaaaagtgtttcctcaacttttccgcagacaactgagctccacagacttctgaggaacttcccttttcctctctcacaccttcctctgctctccctcctccagctgccttgaccttgctctgcagcaccccttacctctccagaaagctccccagctccccggcttcttgcgggccctgtcttcgcttgcgctcagccatcagcacagccacagccactgtgagcagcacggtgcctgtgatgcccagcacagtggcagtctcagccaggcaaagctgggcctccacaccactcagcactgcccctgacagcctttcgggcccagcgcaagtcaggatgcccaggtctacgacactcaagtgccgcaggtgacccaactttccgaaggctcactgcaggtcagtcacgtgtccaggggttatccaacaacagcagccgcatgcctgctgtccggatgcctgccactgccttgacctccaggtgctgcagtcggttacccaggagagagaaggcccagtgctcctaaggttgcaaacgcctcggcctccagctcactgatgtcattcccagctacagagaggacttccaagcccggcacagtggtcagggcagcacccttcacccgctgcagctggttcccagccagcgagagccagtgtaggtggaagaggcccccaaagacccctgcggccagttcagccagctggttgtggctcaggttgagctgctccaggccccccaggcgccacaggctggtggggtccagggaagtgagtaggttgtgagagaggtccaggcagagcagagagcccagggtagccgagaagtctgtgggcagatgggccagctggttatggctgaggttcagctgctccaggaaactgaggccccctagggccccatcagacagatcccgcaggatattgagagaaagcagcaacacccgcagtccccaaaagccctggaggcgccagccggcagatggctgagattattgtggctcagctccaggagccagactccatcaggcagcctggaagggagacagagcaggtggaggcccccacagtccaccacgctgcctgaggtagggcaggtgcatggtattgggcatgctgccaccagactcctgagaaagactgatgccaccatgactatagccattgtgagggaggtgtggccacacccaccccgtccttgctgcatgaagggctggggtgaggatggcatcaagcactcatggctgctgagaccttcaggcctcactcctccgcctgggaccctggcaagcacagtgatgctaggggagaaaaacacaagtagatgccattcggggtctcaccatttgctgggtgcccaaacatcaactcaaagacaccctgtctccacctcccatgattttaaatgttacctaagcttctggcaagaaccctcttggcctgagaccccagcattcggatccccctcccttaaccacctctcattccttcttcctgctggatgaggagcaatcagggaagatggcctgtaatcctctgcacctccttcctcccaccccacactgcagctcactgactttcacccccactcagactgttctctccctcttactttcccgaaggaagaggagcaggatcatcaatggcacacggcagctgcagcaaagccacaccaacagccagagtcatgctcaggagagactgtgcctcctcatagttaccactgctctgcatgttcagagaagcttatctcgtaactacagcaatgatcactgagagtacaagcttctcactgactttctagagggacccaggagaaactctgccttccccggcccccaaacatgcactcaattgctctcatgcagccaacatttgtggagctcccgttctgccagaggtcagagcatcaactagatcctggccctgtctggccactgaggatagggcctcaggctgtgaaagtccaatgcactcacctgtgttcctggcaacacctgcacctgagtgcagccccagcccaggaatggcagtggaaagaatctgggctctagtttcctgcctatctggcctcctcccagagcccagctctcagggaagccgcagccccaagggtgagcatgtgggacaggcttaggaaatccccagccttaaggccttgcatccaggggagcagagctcacccccagcctctttcctcacttccttctggagacccacaacctgctctgtatcatcagaatggcagcttgaggccccttggggccctccctcagttcggataggagtcaggtgtctcctccttcattctatactgcctgcctgagaaatctgccatcatctataattcacccaggtcttgtcttaggcacaaaggaagggaatgctttttcttctcactaggccaaaagtcaaaacacttcatcctggcacttgaggggtgcccagcatctcctggaacacagtatttgtgcctagtacctctgccttgctctaggagcccaaacgtcctgtccaggtttcccagagtgctcactagccctgcccagtgaactcttaagagaatagtaacggccacacagaagggccaggcatctcgttaaaggcttcatttaatcctcaactgaggaaaagaactcttttttttttttttttttttttttgagacaagatctcactctgtcacctagactgaagtgcagtggtgtgatcatgggccaccacagccttgacctcccaggctcaggtgatcctcccacctcagcctcctgagtagctgggactacaggtatgtgccaccaagcccagctaatttttgtattttttgtagagatggggtttcgctgtgttgcccaggctggtctccaactcctggactcaagcgatcctcccacctcaacctcccaaagtgctgggatttacaggcgtaagccactgtgcccagccagggactctgattttacagatgaggaaaccaacgtttgacaaagctagttaagtttccaagtcatactgctagttaggggcaaaagtaaaatctgacataactcaggcctgacagaatctagtcatgcttggcagagcatggtggctcatgcctgcaatctaagcaccttgggaagccaaggtgggcagaccacctgaggtcaggagttcaagactagcctggctaacatggtgaaatgctgtctccaaaaacacaaaaaaattagctaggcgtggtggtgtgcgcctgtagtcccagctactggggaggctgaggcagaagaatcacttcaacccaggaggtggaggctgcagtgagctgagattgtgccactgcactctagcctgggcgacagagcaagactctgtcttaaaaaaaaaaaaaaaattagctgggcatagtggcacatgcctgtagtcctggctactcgggaagctggggtggaaagattgcttgagcccaggaggttgaggctgtagtaagctgtgatcacaccacagcactccagcctgggtgacagagggagaccttgtcttaaaaaaaaaaaaaaagtcaaggtctactagacaagagcgaaggggtgaataacatagattatccctagaatgggaagagaagcagaactattatcaacctagggcatgaatctgagcctctggttaatctcaagcccctcagaattagttcaagtgatctggtacaagcagattatactggaaaaaacttcaggaatcattgtcaataatctttagaaaacattaccaacagaaggttgctagagccttgagctccgcaaaatttccaattttcaagtcacatagcagttcacaaaactcaaaacgggctcatttaacatattatgtctgagcaatttcctaaaacatgaggaccactagtgcccacgagttcactaaaaataagttttacaaccaggcgcagtggctcacacctgtaatcctagcactttgggaggtcaaggtgggtggattgcctgagctcaggagttcaagaccagcctgggcaacatggtgaaaccctgtctctactaaaatacaaaaaaaaaattagccaggcatggcggcgtgcacctgtagtcccagctactcgggaggctgaggcagaattgcttgaacccgggaggcagaggttgcagtgagccataatcgtgccactgcactccagcctggtgacagagtgagactccgtctcaaaataaataaataaataaattttactcaaacgactttatttccttttttgatagggctaccagatgtctatcataaacatctggatgttattaaaatctctcaggatatccctttggataagatgaaaacacagaagacagtttatcaaaattaagaataacacaacattgggatggacaactagtagactgcgatacagaatcaagatttttttaaagctcttaataggttaaaattgttggttaaaaatatttaataacgggctgggcgcggtggctcacacctgcaatcccagcactttgggaggccgaggtgggcggatcacttgaggtcaggggtttgaaaccagcctggccaacatggcaaagccctgtctttactgaaaaatacaaaaattagccaggtgtggtggcgcatgcctgtaatcccagctactcgggaggctgaggtaggagaatcgcttgaacccaggaggcggaggttgtagtgagccaagatcgcaccagtacactccagcttgggtgacagagtgatactccatctcaaaaaaaaaaaaaattttttttagcagcgataaatataaaattcagtatttaggaatctaaaatctacttacacaagctggagaagacttggcataatagctacttctgtaaagaagtctgggcagattttgctgatcacatcaaactgaatcaacagtgtgatgtatctgccaaaagaagctagttgctatagcgtccaacattgcagtaaatggttgcaggaaaggtcccagtgtgctaacagaccatgtccagtgctgggaccacactcaagaactaggaaagcatccttcaaaagccatctgactggagaagatagctctgagtcacatttgccgatttagcaatgtccatgcccctcacccaggggctgtcagcaaaagaaaaacccctgaaagagggactaccatgcaggacacctgagcattaaccttagttctaatggtgagccgccactggaggtcaagaagggcacggacagctgccacatgttgcctccttgagtaatgggtgccccatcaatgaaagttcaagtagaggcagtctgctgaggatgctatagaggggatatgtaaagtgggaggcgggactatactgtataaactctaagagcctggcatcattaagtgctagaaaatctgttctaaacttctgataccagctccagcatgggacacatcctgtttgcaccgtcgacactgaatgctgagttacatggctacatgtcctgcctggagccagtacataagggcaacagcaggacactttcagaaaagtctcatctgaacaaactgaagcgtacatgatgacagcacacatttacaagagtgaaggatcccatattatactcactccctttcataaatatcctcagctcaacccctctccctccacagtgcagactggacacgtctctcaacctggctgtacccaactattcaccttctctgtgtctgcactaaggacactcgatatgattggcagaggcacacaatgggtgcctgtttacccccaaaattcatgagcatgcatctctaaacggacactcaatagtcttaccctattcccctttcaggttaactgggccaccagataggaagtcacttaccctcacctccctgacaaatctagactcagctcctagcactgccctgtcagggaagaagggcccctcctatctgaggcaaatctacccactgtggccagagatcccaacctcgtcttctcagagttcacaggtgacgtgacagtcactggatgtctaactccatcccacgcttctctaagcccaggcttgttatccagctgcccatttgccatctgctcttcagtgtttcctgggcaagataaaatggcaattcaaaaattccagattcttccacaaacttcttcctctcctattgtttgccacctacctagaaggcatccatcgttcctctctgtccctcaccaccttgccctcacattcagtgcatcaagtcctgtcagctctgaaaccaattctctgccaccactgtctcccacccagactgctgcaccgacccctaacccagcagcctccttgcttccgctgccactgtctgatactggaccaagtcccatggctgcccatggtgccaaagaacccagtctctaggataactgtaaggtcctgcaccacctggctccacctacttctctatcgtgctgctcagcaggcttcagctgcctgtcttctgtcagttcctgaacatcccaagctcttgtcaacctgactttagcacctgctgttccctctatccgaacactcttggctagcactttgttcttcagatttcagctgaaatcacatctcagtggccatctataaatattctctctagagacatacacgcccctccctccagtaagcataagcaacaactttaagctacgagacagaccagaataaaagaggccagattagtaaaagaatccaccacttgctggtccctccacgaaagacctataagaagttcttgtctaacactgcagaagtccgcaccagaggaccaaagaaaaaggagaggttagttgattagtcactggaaatatgccttagcctcaccttacccagccaattaagaaacttagctccaatttagacttttcaacaaaactggaaattatagaaaaatgggagaggccagataggaagggggactacaatctgaccagacttggtcccagctgccagagtctgctctagagaaacctgaggtagattcctgctgctttccggtctggaaccaggtgcatctctctttcttcccctgtatcctttactggttgtcctctttccaaacttgaactctaagctttcctcaaaacctactcctggatcacttttcatattgactcaggcaacatatccagttatcatgctgatgactttaaaaactctattttccgttctgtctcaacagctgggtgctagcaaatacacaatgagtgagtaactttccctgccttggagcctcaagacaccccaatagaccactaaagataaatctaaacaaataccgaaaaggcaactcacacatgccaaatgacatgagtgacagaaacaaattactgaaggtatcagtttccattccaattgtcaagaatggcttcacgggtagccctgaagcagggcattgtagagcaagatagagattactgaggttgcaagtaatcttagagatcatctagccccttaccttatatatatatcaattctaagatgctaataaattggagtataccgttgacttaactttgtggactggaaccagttggcaagtttcttttgacatcatgaactgcactttcagaaacacaacgggcaaggaaaggtgtctcaaaatctagaaaacaacatttgtataggaacgaatgtgaaaggataaaaaaagaagttaacaatgttttagggggtggtagatgaaaatgtctgccttgttttctagtttttctgtaatgagccacgtaaggttgtttttcgtttgtttttgagacagagcctcgctctgtcacgaggccggagtgcagtggtgcgatctcagctcactgcaacctccacctcccgggttcaagcaattctcctgcctcagcctcccaagtagctgggaccacaggtgcacaccgccacgcccagctaatttttgtatttttagtacagatggagtttcaccacattggccaggctggtcttgaactcctgacctcaagtgatccacttgcctccgcctcccaaagtgttgagattacaggcgtgagccacagcgcctggctgtgtaaggtttttataacataaaaaaacaaatttgttttgaaactattacagccacacaatgtatcaccagtggatggcagccaaagagcatctttttcagatacttcatactgtttatctgattatgttaaacacctaaaatttaggcaatatatgcagatgattccaagtttcttttttttttttttttttttgaggcggagtcgcactctgtcgcccaggctggagtgcagtggcgcgatctcggctcactgcaagctccacctcctgggttcaagtgattctcctgcctcagcctcccgagtagctgggactacaagcatatgccaccatgcccggctaatatttttgtattttcagtagagacagggtttcaccatgttggccaggatggtctcgatctcctgacctcgtgatcgcccgcctcagcctcccaaagtgctgggattacaggcgtgagccaccacgcccggccaattccaagtttcttaaagaggaattctctggcactgatggcctccagcagtgataggaaagcaaacctaccatgtaaatctaacatcttccaaccaggcaaccagctccctcccacactcccacttctaccactgtccttaccactcatcctgtacatttcagcttccagcactacacattctcaccacagtaccctccatgctgtagccgccacaccacgcgggatagcacactcgatctgtgtatgaatgaaatgcctctatttcctttaccagtatgtttcaacacaacagattttgagacacacattcttagcttcaaatatgtcagggagcctttaccctcctcaatcagtagttcacaggctgcagctactgaactcatactgaagtgcttgagcaattttcaaattttcaaaacaccaaacagaaatcagtaatgagctgctgagacttgaacggcacagattcagtatcaactcactgtggtaaggctgtttatacaataattggatgctctaaatagcattaactccaaaggcgtgtgcgtggtggtggcgagataatcaggtgctgggtatagaggtgtgtgtgtgtgtgtatatttggggagaaaggagaacaccccaaaacaaagccgaggagacactgcaaaactactgcccatactgcatcatagatgtaagctctctgcaccacgctcttccatggttcaatatgctttcaatctaggtggcaatttctgccattctcactagtctcccgtgttccagcctcattctggcaaacaaaagtgagcagtacacatgccatcactttggaaagtcccactgcattaggaacccgtgagtgttaagcctcgggccttcttccagctccgctaccacaggcaggtggggcactctagacaagtcacttggcctcagtggaactcactctctactctgaaaaatagttttgaaaattatcaaggccaggtgccgtggctcgcgcctgtaatcccagcattatggcaggccgagacgggtggatcacctgaggttgggagtttgagaccagcctgaccaacatggagaaacccagtctccactaaaaatacaaaattagccaggcatggtggcacgtgcctgtaatcccagctactcgcggggctgaggcaggagaatcagttgaacccgggaggcggaggttgcagtgagccgggatcgtgccatcgcactccagcctgggcgacaagagtaaaacttcatctcaaaaaaaaattataatcaaaagcattcttaggcactccaaggaagggttaaggggtgagatctgtgagacccagggcagggctctgagacccctacccctgcctgaaccagatctgcccaggtgctttacatattagcctcccttcaaataccatctaaacaaatttttttttttttttttttttttaaagagacagtatcttgctgtcaccaggttggagtgcatcctggagtgcagtggtacgatcacaactcactgcagcctcaacctccctggctcaagtgatcctcccacctcagtctcccaagtagttgggactacaggcatgtaccatcgcatctgcctaattttttttaaacgtattttctgtagagatggggggtctcactatgccacccagaatggtcttgagctcctgccttggcctcgcaaagtgctgggactacaggcataagccactgcacctggtctaaactaaggcttctaaagcaaacatggaacttctagaaatcatctactccaatctcacctccagatttaactgtccaaggatcaagctaacatttatactaacatttacagagcactttctaagtattaggcttttaaaatatcttattaacccttcatatcaaccctaggagatggacattatttccacatttacagttgggaaatttaaggctaagaaagatgaaatgacttatccaggaacaacatgaggaatgaagttatcaaagcccttgttctttattccacacctcactgcctgcctttccaaccacactaactccacctcctgaactgtttaaagttccacatcatttaacaactaaaactaaggagtcaaaagtgcttcctgccaaacccagttggtactcacttccccccatttacagaattaagaccaatggggggggacaggaagatgtgggacacatgatgaagagcttcctcccaggcttgctgtttcccattaattaatcacctccactcatcgtatctcttaggttttatagatcttacaaggtctcttcccttctccctctctcaccttctctaagtctacattcccatgtaggctaaatcaaaggctcagttctttaaatcaagttcagaccagtggcaggtggatctgaaagtttacttctcagctcgccgaccatttgtgcctccaaacagtcctgtaacaaatggttctatgtatgtgactacagccttttccccacactccacctacacaccactccaaaccctggacccccatcttaaattataccctgcattatatttctggatgagtcctcgggggtgaaaagagagggtaaatagtaggaagaagagactctaaagagaaaggtcaaatcagacagacataccttggatcctctcccctggggcctctgaaggacgcacaaacctgagacatgagtgatggttaaaaaaatttgggttttattgtttttgctaaataatactaaaaaaaaaatttcattttgaaggcagggcttgaattatttaatttgatccatttatttaattaaaaaaaaaaggaaggggaaagagatcatggccaaaaaaatagtagttaacccccaccccacccccaaagctctagccagtcatgtgagcatcacccacatcccactcagtgcctgatattcggatggtggcatactctgccccaggagactgcctgaaggcacggggcaatgggtgccaattttagctctcagcaggttagtcaaccagacaaactggtgggctaaagtccagaaattctttccaggttttctgctcattggctgagcacatacaaactgtcataagcctgtaaaatttaaggggagttggggtggggcgtaagagcaaaaggacagcaggagaagagaaattacgggtcacccaagtttttcctgggctagtggctctggatatagatttaaagagaggtcagagtaaatggactccaggtttcttatcaaagaaaactatccctcaatgaggagctgagatgtgccatgcaagagagttcttcctgcagaggcacaggagaaagggcagctgactctctcatgtggagagagtggcgaggaaggtcttctagtaccatgaagtaagacaggcagagggagaatcctgaggtttgggccaaatgtgagactggtacacacacagttaaagactaaaaagccatcaggaaccctcaaagccaaattctatctgcacactggctctacaaagttcgcagcaagaatctcttgcaccaagtcaagttagtggcctggctatgatggatggtggggagggcaatacatttttattttcagagggatgaggtgggaagaacagccatgatctagtaaaaagagacctgcaagaagcagaaaatatttagagaacattttaatatatattttcatatatatatttaaagttaagaaaaataaaactaattcaagccatgccctgtgcaaaaaaaaaaaaaaaaagaaaaaagaaaaaaaaaggaaaagaaaacaaaaatttaaagtgagacgtttgctgctctggtctcaatttaagaatcacagtcagcttgttacttttattttggaagaaaagatgtaaaagtttctttcaatcattcagaaggcaagtgtagccacttataaaaacagaatggcaggaacaaactaggaaaggaaagtcagaagtaaagggcagagtgggaaaataattttcaaaaataaaattaacaaggtgactgttccagaagagggctgtgaaaaggacatggtggaccgaagtctgttagtcaagtaatgattcaacttttaaattattctcttgttcttttttgttgggtgttttgtttgttcaagtctaagatttggaaatgctgaccctttgttaagagccaacaggacatataggatcccttccctcccccggcctgcctccgctgaagccaccaccagcgcctccttggctggatgctggaagagtcctccatgtgtacggactcaggatgacagggcagcctccttctgtggttgctgggcttgtgaacgttgcagtatcttttggctttccacgtctctaaaatgtttttcaacctgaaaaagaccaggcaacccaggtcaacaaaggagatgcggaagaaaggtctcccaaacaatccaacccaggtttccacagccccatcctggctgtccagcccattggtgtccaggcacctttgcccttgctgtctattggccttcccaaccacaaggtaggccagggcctcctgcttcagccacatttttttgcagtttccactaagattggctagaagaaggtgaatctacaaactaaactataaaatataataaggggagattatcatgacctaaactcctcctctcttctatacccaagtacaaaatgaaaagctgctgggggaattacagtcttatcaaacctcctacatctacaatgttggtctctcaatgttcctcagaggaaaaaaaaaaagcaggagtgttttttaagtttgttttaacaaatgctaagtccagtgacatatgtagggtcagagacaccgacggcaactgatttataccaaccagatctttctagaatggtacctgcagctaagaaaaacccaatatggggccaggcgtggtggctcatacctgcaatcccagcactttgggaggccaaggtgggcagatcacttcaggtcaggagttcgagaccagcctggccaacatggtgaaaccccatctctagccgggtgtggtggcatacgcctgtagtcccaggtactcgggaggctgaggcaggagaatcgcttgaacccgggaggcggaggttgcagtgagctgagatcgcgccactgcactccagcgtgggcgacagagcgagactctgtctctaaaaaagaaaaactcaatatgggatgagagaaactgctcaggcccaataccatggaacagtcttcctaattccaaaaagccagcaaaggacatagggtcacccactcacttctttccacaccacccagtggttccattcccacaggactgcagaaccccacagtacagggaaggcagggaggccagacagggcctctgctgctagaggaggcagagactgtagcacaatgtcctggtctggtgctaaagactgaaggcctgaggaaccatcctctctcccctaaagtctgaaggctcctttacttactattttgcgtacatggctcagtgcactcccctctttgcctttacagttttccacttgatatgggggtgtaataacaacttcttccatgactacgatgtttttttcttgccatttacagtctttaatgctggaaggagaagacagcaggcgaaatgtaacctcttgggggcatcccacatctcctgtctgatgaataaataactccagaaggctgatcccaagttcccagctcaccactcagccaacaactagatgccagcagcccatatagtagccaagaaacattccttgggtgccactggctagaaaagcaatgaaactcatgcacatttattcttgggagagcccagaaattgttactctgaagcatcagagatctggagagccataaaaatgtgatagtggcctcaagaatccaaattaagatagcagcctagggcagaggctggcaaactttttctcttaagggtcttgtaacaaacattttaggctttgcagtccatatcatctgttacaactagcactgagttctgccatagttgtacaaaagtagcatggacaataggtaaaacagatgagcagatgtggcctgctggcatagtttgtcaaccattggcctagggagaaataccacctttagaaagacaggagaacaggtcgggcgcggtggctcacacctgtaatccccgcgctttgggaggccgaggtgggtagattgcttgagtccaggagttcgagaccagactgggcaacagggcaaaaactcgtctctactaaaaatacatacaaaaaattagccggtagtggtggcatgcgtctgtagtcccagttactccgggggctgaggtgggagaatcaccagagccggggagattgaggctatagtaagctaaaatcgcaccactgcactcccaacctaggcaataaaagtgagaccctgtctcaaaaaaaaaaaaaaaaaagaaaggccaggcacagtggctcacgcctgtaatcccagcactttggaggccgaagtgggcggatcatgaggtcaggagatcgagaccatcctggtcaacatgatgaaactgtctctactaaaaatacaaaaattagctgggcgtgggactgcgcgcctgtagtcccagttactcaggagggtgaagcaggagaatcgcttgaacctgggaggcagagattgcagtgagccaagattgcaccattggactccagcctggtgacagagtgagactccgactcaaaaaaaagagagagagaacaaactccccatcttcctatgatctgtactctgacccttatcacccataatgggagctgctcttcagactggctcttctcaattatcagacagttgggcacttgccagactgggaaaacccattccagttcacacttgggaagccccagggcagctgatgcgactgggagttccttcacatacctgtaaatgttcagatactcacaccacagcctcaaacagctctgatgccagctgccatctgtgcaccagatccagggtggttaaacagagtaacagatggcagtgtggggtggggggaggcggggtggagaggggtgtcaaatgttccagtttttcagcagctagggaagctagtggagagtcaaatgacttctgctgtgacaaaatgtttttttttgagacggagttttgctcttgttgcccaggctggaatgcaatgcacaatcttggctcaccacaacctccacctccagggttcaagcgaatctcctgcctcagcctcctaagtggctgggattacaggtatgcaccaccacgcctggctaattttgtatttttagtagagatgggggtttcaacatgttggtcaggctggtctggaactcccgacctcaggtgaaccgcccacctcggcctcccaaagtgctgggattacaggcgtgagccaccgtgcccgaccaacaaaatgtctttttttttttttttttttttttttttgagacggagtctcgctctgtcgcccaggccggactgcggactgcagtggcgcaatctcggctcactgcaagctccgcctcccgggttcacgccattctcctgcctcagcctcccgagtagctgggactacaggcgcccgccaccgcgcccggctaattttttgtatttttagtagagacggggtttcaccttgttagccaggatggtctcgatctcctgacctcatgatccacctgcctcggcctcccaaagtgctgggattacaggcgtgagccaccgcgcccggccccaaaatgtcttttaagaggtggtaagaaggtggcctgctctaactccctgtgttcatcccaatctacaatgggaaaagtgatatagatataactttcccttaataaaaactgcatcagcttttaaagaaaggcacaaaacaacaaaatcaaagagaagaaatcactagttctaagttatggactactaggtctagaagggatccttagggataatctaatccaaaactaagttttacagacaagcaactaaagaccagagaagacaacttgtccgtgattacactattcttctgtgtggaaagggggctacagcacctgcacctctggatgctggcatattgccaataccctacccagcttccccagtagacttttaggaagacaaccacccaaaagcctgccaccagacagcacaaccaggtagcattaccccaggacaaaggacctctccgatcccaactcacgtcttgtgaatggtctggaagagctgctggccctctagagagacaccagcactgattgcataggcctggctcagcttctcctccttctctgtccgtgctttgctggcaagctagggtggaagagaggaaagagactcagaataggattcatcttcattcttgccaacagtcaggacctaagctgaagaaaggaggccaggaaagacttgtttggacagattctgttttctcagaaatgaaaagtgaaacaaattttaaaaatccacgacatacctgaacagttactggtattccaagaaaacgttccttccttccttctaatacttactgcatacctaccatgtgccagacattcactatgctaggctaaatatagcctgaagtgggtgggggagacagactataaacaagtaactgaaatcaaggtgatttcagacagtgataagcactaggaagaaaataaagcacttttaacattatagagtgtggctgggggactatgtgatggcaaatgatggtcagagatttaaaaatatatacatttccggccaggggaggtggctcatgcctgtaatcccagcactttgggaggccgaggcaggtggatcacgaggtcaggaggtcaagaccagcctggccaagatggttaaaaccctgtttctactaaaaatacaaaaaaaaaaaaaaaattagccaggcgtggtggcgggctcctgtaatcccagctacttgggaggctgaggcagagaattgcttgaacccaggagaaggctgcagggagctgagatcgcgccactgcactctagcctgggtgacagagcaagactccgtctcaaaacaaaacaaaaccaaacaaaaaaaaatacatacacatacacacacacacacttctaactgggtgcatcactgaggtagggagttcgagaccagcctggccaacatggtgaaaccccgtctctactaaaattacaaaaattagccgggcatggtggtgcgtgcctgtaatcccagctactcagaaggctgaggcagcagaatcacttgaacacagcaggcagatgttgcagtgtgccgagatcatgctactgtactccagcctgggcaaagaagtgagactctgtctctttaaaaaaaaaaaaaacaaacacacacacacacacacacacacacacacacacacacacacaaacacacacacacacacagaatttccattcaaggcgaaaattaagatttatcagctgttgtgctagagcctccagtttaaaaattaatacataccacaccttcacagaccacaatctgagactctaaaaactcttacagaacattatctgtgctcacatagggagccaggactcaagtaaatctaaccataaacgctgtccacctttaactttagctaaaggcaaccctgtcctgcttttgagaaaaacgaagagtctgaattctacgtcatgtctgttccttcactgccctctggtggaaccatccacaaactgatcaaaagaaaatctagtaaaatctggtagtctactacaatctcgtaacttctaccctgtcaatccctatcacctctccagcacatttctgatccctaccccacactactggttgctagagattccagaggtacaaatttgtttgagtgtaagacaaaacaaatgtgctagacaaggtagttaaaacaaattaaaggcaaacaatgcatcttaaaagtccaacaaataatctggagactcttcagacccatgaacatgaacagctgagtctaacaatgctgcagcacatgtgcaaacacgcgcgagaacacacaatttgtccccaaacatcagttccttaaataaaaagaggcactggctgggcccagtggctcacgcctataatcccagtactttgtgaggccgaggcaggcggatcacctgaggtcaggagtttgagaccaacctggccaacatggtgaaaccccgtctctactaaaaatacaaaaattagatgggtgtggtggtgtgcacctgtaatcccgcctactcaggaggctgagacaggagaatcgcttgaacacgggaggcagagactgcagtgagccgagattgtaccactacactccagcctgggcgacagagcaagactccgtctcaaaaaaaaaatgggggagccatacctacagcatattccaaaagtaccttaatgcttggaatcttcaaacatttatattctgcttttacagtgatccatcaaaccataaactaagcatagctttttttcttgggattgagtttcactcttgttgcccaggctggagtacaatggcacgatctcagctcactgcaacctccgcctcctgggttcaagcgattctcctgtctcagcctccagagtagctgggattacaggtgcccgccaccacccccagctaattttttttttttttttgagacggagtctcgctctgtcgcccaggctggagtgcagtggcgcaagctctgctcactgcaagctccacctcccaggttcacgtcattctcctgcctcagcctcccgagtagctgggactacaggcgcctgccaccacgcccagctaatttttttgtagttttttagtagagatggggtttcactgtgttagccaggatggtctcgatctcctgacctcgtgatccacccacctgggcctcccaaagtgctaggattacaggcgtgagctaccacacctggccatttttttgtatttttagtagagacaggatttcaccatgttggccaggccggtcttgaactcctgagctcaggtgatccacccacctcagcctcccaaagtgctggtattacaggcgtgagccaccacgcctggctccaagcatagttttatagcagaggaagtaaaccaagtgtctaattctttgtttataaaattaagcactttctcaaggcttaggtttgactatgaaaaaaaaggaggccttcaattgccatgggtattcttgtccttgcaagtttcaaagactgtcttaggaaggaggagcaggcgtgagcacagaaggccagctcacgctgtcatttcagcctccccgggtaagagagggaagaatggcaaaaccctgcagtgatctgaagccagagctcctttttcacaggatctctaggacatggagagagacaaatacagcagcaatatatatataatctttcaagactggctgccattctggccctaccaggctataactttacagacaaataaacacacaggctgacagcattccaagcagtggcaatcccaactgtaacaagaaagccttgtagtttctatggaaagagctgctgatgatgtattttaagcagcaacaagcaacgcttactcaagcaccaaaaaaaccccggtaacaaggaggagtttcctttttttttttttttttgagatggagtcttgctctgtggcccaggctggtgcagtggtgcaatctcagctcactgcaacctaaggaggagtttccttgaatcttgctttccaaacaatgccttaagaaaatctgaagtcggccagcgctgtggctcacgcctgtaatcccagcattttgggaggctgagggaggaagatcacttgagcccagtagttacagaccagcctgggcaacatagtgggaccctgcctctattaaaaaaaaaaaaaaaaatctgaagtctttaaggaaagaaggaaaaactggagggtggcagagctcctgggaagcatctagtggacaggcgggcatttaccttataagcaggctggaagatctcactttgaaacctcaatcccctttaaaaacgtttattcctgaaaatccaaatcatctccgaatgctgggtcagagaaagctgcttctataaagcttgtgttgactagatagtctgaacgttcaaagagtaaaatgtcgttgtcacctacatagcagcttaaaaacataacatcaccccatttagtaagagacaagagttggctcaggaaaccaggcatctatgcagaatgtttaagaatggaactgacaaattaagctagagaaggggagaaaaaaaagctggaagaagagccacttgaatttttgccagagagaaaataaaatggatataaatctcagccagaagtgattctttagacaggctgagtaacaatgacacactggttatagaacaatgatttcaaaatacaccccccacccccgccaaaataccagttgtgcaagtgcaatctcccctaaagtctccaaaagcaaaggagaatggactagacaattctctatttcaattctaatgcaaacatcccaaatgctaaatgatgtaagggagcacttagaaaagtcagcagaaatgactgtaagctgactgtatatattttcagtttgcccccaatatactcaacctacagtaatgctttagggatccggactcagctacacagatctgcttttaccaggaagctgtacaaatgggataaaatctcctagagaggaccccatcaattaggggtccccatcaatgggggagaccgctctcaataaaagaaactagaagtgtttccttttttcaaaattgagggtggggagaaggagattaccttgcccttttttgtcatgaaaactcatgcagaacatgaatatgccttcttttgtaaagcaaacgattatcactctaccctcaatttagctgctgtacaaatctaaattttcccacatatttttgcaaatgactatatacctataaatggcccaattattccaagttagtaagtttatggtttttgccaaaccactggagagaaccaataaaagctgccctcagtagagaaagtgtagaatgtgccttttaggcttgggagggccaccaagattactttttaaaatctatttctttttttttgagacaaagtcttgctctgtcgcccaggctggagtgcagtggtgcgatctcagctcactgcaacctccgcctcccaggttcaagggattctcctgcctcagcctcccaagtagctgggattacaggtgcccaccaccacgcctggctaatttttgtatttttagtagagacaggggttcaccatgttggtcaggctggtctcgaactcctgacctcgtgatctgcccgcctcagcctcccaaagtgctgggattacaagcgtaagccaccatgcctggccttaaatctatttctatagtttttcctttactagatatttcatataaatggaatgatacaatgtgttgacttacgtctctggcttcttccacttagcacatttctgaggttcatccattttgtttcatgtaccaatagttttttaaattgctaggaagcattccactatgaggatacagttctaccttttatatattcattcactagttgatggacagttgatcaaaatctgaattgtttccagttttgttttttgtgttttctgaaacagagtctcactctatcacccaggctggaatgtaatggcacaatctcagcccactgcaacctccacccactgggctcaagcaatcctcccacttcagcttcccaagtagctgggaccacagaagcacaccaccacgcccagctaaggtgttgtatttttttgtagagacagggtttcaccgtattgcccaggatagtcttgaactcctgagctcaaacgatccacccaccttggcctcctaaggtgctgggattacaggcatgagccaccctacccggctgtttccagtttttggcagcagtcacacacaagtctttgtgtatgtaaaagtaaaaatattttacttttttttttttttttttgagacggagtctcgctctgtctcccaggttggagtgcagtggcgcgatcttggctcactgcaagctccgcctcctgggttcacgccattctcctgcctcagcctcccgagtagctgggactacaggcgcccgccaccacgcccggataatttttgtatttttagtagagacagggtttcaccctgttagccaggatggtcttgatctcctgacctcatgatccgcccgcctcggcctcccaaagtgctgggattacaggtgtgagtcaccatgcccagccaacgttttactttttaaaagtaaaaagattttgctttttaaaagtaaaaagtctctgtgtgtggacatgtttttacttttgttaggtagataactaagagtagaatttctgggtcatatggtaagtgtatgtttaatttttaaagtaattgttttcctgctagtgaagtttccttaaaaacaaaacaaaatggccgggtgcagtggctcacgcctgcaatcccagcactttgggaggccgaggcggatggatcacggggtcaggagatcgagaccatcctggctaacacggtgaaaccccgtctctactaaaaatgcaaaaaatcagccggggatggtggcgggcgcctgtagtcctagctactcgggaggctgaggcaggagaaaggcgtgaactcaggaggcggagcttgcagtgagctgagattaatgcgccactgcactccagcctgggcaacagagccagactccgtctcaaaaaaaaaaaaaaaaaaggaactgtcaaactgttttctttttttttttcttttttttttttttttgctggagtgcaatggcgcgatcttggctcactgcaacctccgcctctggggttcaagtgattctcctgcctcagtctcccgagtagctgggattacaggcgcccgccaccacgcctggctaattttttgtatttttagtagagatggggtttcactatgttggccaggctggtctcgaactcctgacctcgtgatccacccgcctcgacctcccaaagtgctgggattacaggcgtaagccacagcgcccggccctaatgtttgatagttctaaatctgccacctactcaccaacactgggtactgttagcctttctgatctcagccattttagcagaagtatagcagtttcacactgtggttttcacttgtacttccctttatgtctaatgatatcaagcatcttatgtgcttatttgtaattactgtatcttctctgatacagtattcaaagcttttgcccatttttaattggactgtcttttttttgagatggagtcttgctctgtcacccagactggagtgcagtggcaccatctcagctcaccacaacctctgcctcccaggttcaagcaattctcctgcctcagcctccagagtagctaggactacaggcccacaccaccacgcccagctaatttttgtatttttagtaaagacagggtttcaccacgttggccaggctggtctcaaactcctgacctcaggtgattcacctgcctcggcctcccaaagtgctgggattacaggcatgagccaccatgcccagcctggattgtcttattatcattattattttcttttttgagataggtcttgctctgttgcccaggctggagtgtactggcataatcatggctcactgcagccttgacctccttggctaaagcaatcctcccacctcagcctcccaagcatctggaaccacaagcaaggaccactatgcctggcaggtttgtttgttctgtttttttttttttaattttatgtagcgatggggtctccctgtgttccctaggctagtctcaaactcctgatctcaaatcatcctcccacctcagcctcccaaagtgctggaattacaagcataaaccaccaagcccgggctgccttattaagagttcttggctgggcgtggtcactcacacctgtaatcctagcactttgggaggctgaggaaggccgatcacttgagccaggggttcaagaccagtgtggacaacatagacagtgtccgtattaaacacacacacacacacacacacacacacacacacacacacacacacgcaaataaaaagagttctttatacattctggacacaagtgctctgtaagatgtatgttttgcaaattatttctcccagtctatggcttgtcttttcattttctttatgcagcaaaacatagaaaaattttttccaggccaagagcagtggctcatgcttgtaatcccagcactttgggaggccaaggcaggcagatcacttgagcccaggagttcgaaaccagcctggtcaacatagcgaaaccccatctctacaaaaattacaaaaattagccgggcacagtaacatgcacctgtagtcccatctacttgggaggctgaggcagaggaattgcttgaacccgggaggcggaggtttcagttagccgagcttgcaccactgcactctagcctgggtgacagagagagactccatctcaaaaaaaaaaaaaaaaaaagtaaccataaaaattcaatgactatcacccatactacacccattttcaatgcaaacatgctagctgctggcctcactaccaatcagttagaagcactaactggttagcatctcaaagaataaaaagcaccaagtttaagaacacactgggttcaggcaaaccaagaagcataaacttacaaatatttgttattaatgtgcatatggcttacttgaaatcactgcacatgacaatctgtgcttacctggctctcctttcattctgcatgattcccagtgaaaacacagtccttgtatactaaccagtgtttcctcctgtgcccgttttatatatagcaccttgatgtgggcaaaggagaaaagtatatgcattcgatatcaaagcacatcaatattaaaaggcttctaggccaggcacagtggctcattcctataatcccagcactttgggaggccaaggcaggaagatcacttgaggccaggagttcagactagcctggccaacattgtgaaaccctgtctctactgaaaatacaaaaattagcaccgggcatggtggtgtgcacctgtagtcccagctacttgggaggctgaggcaggacaatcacttgaacccgggagacggaggctgcagtgagctgagcttgtgccactgcactccagcctgtgtgacagagactctgtctttaaaaaacaacaacaacaacaacaaaaacaaaacgaacaaaaaaaaccggcttctaatcatgcctgatgctgggtaacccttatttttgtttgtttgtttttgtttttaagagacagggtctcactcttctgcccaggctggagtgcagtgccatgatcctacacaatgcagtcacaaactcctgggctcaagcgatcttcccacctcagcctacagagtagctgagactataggtgtgcgccaccacacccagctacttttttttatttttgtagagatggggtcttgctatattgcccaggctggccttgaacttctggcctccagcaatcctcccgcctcagcctcccaaagtgctgggattaaatgcatgagccactgcgtcccacaagtgagtgatttaatgaacaccaaggacacatatcttgtctgcacgcagtgacatggaaggaaaagggaggagccaaaagaacaaaatccaagcaatatgcacttcatcttgttattcagtcaccagctgggccatcttatttccacatgcccagaccaggaaggcacaggtgccgtggggaatccagagggattcctactacaagtatttaacaggctgagacagctgatacaacaagggaaacagagaagccagagaggagcctgctgggtgtgacctactgactccaatgagccactctcagtttgccttctctgtgtatttgggtcttccaaccagctgccctcacagagggcttaggaaacactgcagctgctgcccggaactgcttatgacgcctgcaagcctggtgggtgtcaagggatggcagaccagagtggcaaagaactgtcatcgtaagggcccttgcatgttccctatgttttgaatctggggtaggctcttggaaagccttcattctttttatttttatttttttgagatggagtttctctcttgttgcccaggctggagtgcaatggcacgatctcagctcaatgcaacctccacctcctgggttcaagcgattctcctgcctcagcctcccaagtagctggggttacagacatgtggacaccatgcccggctaatttttgtattttttttttttttagtagagacggggttttgccatgttgaccaggctggtctcgaactcctgacctcaggtaatccacctgcctcagcctcccaaagtgttggggttacaggcatgcgccaccgcacccagacaaagcctttattcttagctagcaacaaataggctctcaaaaatatatcttctgaatatcagcatccccagggcaactgttccctagctgaaagcttgtgcctgaacattttttttttttttgagatggagtctcgctctgttgcccaggctggagtgcagtggcatgatgtaggctcactataacctccacctcctgggttcaagtgattctcctgcctcactgcctcagcctccagagtagctggtattacaggcacgtgccaccacacccagctaatttttgtattttgagaagagatggggtttcaccctgttggccaagctggtctcgaacccctgaccgcaagtgatctgcccgcttcagcctcccaaagtgctggaattacaggcatgagccaccgcgcccagtgtgcctgaacatttctaataaaatactgttcctggacaggcatggtagctcacaactgtaactccagcactttgggagataggcgggtggatactttgagctcaggggtttgagaccagcctgggcaacatggcaaaaccctacaaaaaattttttaacaaattagctggggggctggacgtagtggctcacgcctgtaatcccaacactttgggaggctgaggtgggcggatcacgaggtcaagagattgagaccatcttggccaacatagtgaaaccccctctctactaaaaatacaaaaattggctgggagtggtggctcacacctgtaatcccagcactttgggaggcagaggagggcagatcacaagatcaggagttccagaccagcctggccaatatggtaaaaccccgtctctactaaaaattagccaggcgtgatggcgggcacctgtagtcccagctactgctgaggcaggagaatcgcttgaacctgggaggcagaggttgcagtgaaccaagatcgtgccactgctctttagcctggcgacagagcgagactccgtctcaaaaaaaaaaaaaaaaaaaaaaaaaaattagctgggtgtggtggcgcactcctgtggtcccagcttctcgggagcctagcttgtgcctggggggaggaggtggcagtgaggtgagattgcaccactgcacttcaacctaagtgacaaagtaagaccctatctcggggagggggaaatatatatatatatagttccctacaaattggacagttaggaactaaaaaaatacagtactctacttgaagttctgttctagaatacctaagagtaaataaataacaatgaatcaaaatattgaatcaggccaggattagtggctcatacctgtaaccctaacactttaggaggccaagacaggaggatggcttgagtccaggggtgcaagaccagactgggcaacatagcaaggcccctgactctaccaaaaaaaatgttagggcaggcacagtggttcacgcttataatcccagcattttgagaggccgaggcgggtggatcacttgaggtcacgagttcaagaccagcctggccaacatggtgaaaccccatctctactaaaaatacaaacatccgctgggtgtggtagcatgtgcctgtaatcccagctacctgggaggctgaggcaggagaattgtttgaaccggggaggcggaggtagcaatgagccaagatcatgctactgcactccagcctgggtgacagcaagactccatcttagaaaaaatttaaaaagtttaaattagccaggcacggtggtgcacgcctgagccaaggaggtcgaggctgcagtgagctatgatcatgtcactgcatcccagtctgggcaacaaagcaagtccctatctctaaattaaaaaaaaaaacaaacaacaaaaaaaaaaccctgagcccagcctgggcaacacagtgagaccctgtttctacaaaaaaaaaaattaaaaaaaatcagccaggtgtgttggcatgcacctgtagtctcagctacctgaaaggctgaagtgggaggatcgcttgagcccaggatgtcaaggctgctgcaagcagagcaagacaacagagcaagaacttgtctttacaaaaacaaacaggccgggtgcggtggctcacacttgtaatcccagaactttggaaggctgaggcaggcggatcatgtgaggtcaggagttcgaaaccagcctgcccaacatggtgaaaccccatctctactaaaattacaaaaattagccgggcatggtggcgggtacctgtaatcccagctacttgggaggctgaggcaggagaatcgcttgaacccgggaggtggaggttgcagtgagctgagaccgtgccattgaactccaggctgggcaacaagagcgaaactctgtcttaaaaaaaatatatatttatataaataaataatctatttatattttatataaacgtatatttttatataaatttacataattaataaataaataaatcaccactctggcctggatgacaagagcaaaactctgtcttaaaaatataaataaataaataaagtgttacatgctgtctgaaaaataaatactgttctttaatagtatcttccctcctttttgagaactaacaacctccagttcagctcaacagaaaagcatcaagttctaaattgcagaggtggacaaactgagcactcccaaatcagcttgatcccttttctcttccttccctttctctgaataattgccatttatttttcaagcccctcctccactgtcacatctgaagtgtcttccctaaaatgctcactactctataccaagggttggcaaacagcctcctgtgggccaaattcagccaaccacttgtcttagataagtttcattggaaaacagccatgcccatttgtttacacattgtctagggctgctgtgctacaagagcaaggtcgagtagatgtgaccaagaccatatggccaatacagcctaaaagatttactatctggccctttatagaaaaagtttgctcctccctgctctatgctgtcacgtaccttggacatatgaccactagtgcagagcgggtctcaccatattgttatcactaagttaaatgctgctgtccctcaccactcccaacaaatgtgagattctggagggcaagaggggtgttttaatcatcctggcatttcccagcaccttgaagggagagagtgcaagagggaagacagaaaaaaggagaaacaatgactatcagagattcagaggaccaatcacaaaacagttcccagaggtcacacattcattaacagcacagttggaaaaacactgctgttcttcaaactccctatatcttactccacagtacttttagcataatgtgtagatcctttaattttccagcttaggtagaatttgcttcaatctccagggtagtttctgatatttacctgagctagtcttaaaattccattgccagaatttgactctaccacttgtttggttcccctatcccaccccaagcctgttctctgccagaaaaagttttagttagaatactgttctcttaatactggaggaattaccaccactgacccaccctaatgtccttgttttgaactgtctccacgtcaagggtagggtgcagaggtggctgcaacaacacacctatggcacaactctgccagactcacctgggctcagcaatttatcttttcaggaggacaacaattctcctactccccacttccatgtcctataaggccaagaaggtccccttgggaactaaactcttggcttaaaaagagccccactttgtcagcagactgccatgcactataacctgaactgagtcatgagttctagcctgcagcactgtacccccatcatgattctgtcaggttgaccccaaagattgaatgccactgaatctcacttcaaaaagccaatgggttttgttgttgttgtttttagacagggtctcactctgtcacccaggctggagtacagtggcatgactacagctcactgcagccttgaccttcccaggttcaagtgatcctcccatctcagtctccaaagtagctgggaccacaggcacaccaccacatctggctaattttgtattttttgtacagacagggtctatgttgcccatgctggtcttgacctcctggcctcaagcaatctacccacctcaacctcccaaagtgctgggactacaggtgtgagtcaccacacccaccaagtcggtgatttttaaaatggcaataaattattccacctttctgacccatttgacaccactcactacttgacatgcccctgccactcagcagtgatgggatcttcctctccatctcccacctgtatcttcctgatgcttctatgatgaaacagctatctgctcaaagccaggtgcaagttttacccatggactctcaccagggactgcggccttggcgacgttttctttttctttttttttttttaattttgagacagagtctcaatctgtcgcccaggctggagtgcagtggtgcaatctcggctcactgcaacctctgcctcccaggttcaagtgattctcctgtctcagcctcccaagcagctgggactacaggcgtgtgccaccacgcccggctaatttttcatttttagtagagtatttttctatttttagtattttcaccatattggccagactggtctcaaactcctgactttgtgatctgcccgcctcggcctcccaaagtgctgggattacaggtgtgagccactgcacccagccagaaacattttttaactaagttaatcatgaggttacagcctctagaagccagaaaaactatctgtagtaaaaacttgcttgccttagacaagtggttcttccttcccacattcacataccttcttacttcctagtaaagtatacatagctaaacataggctggccaggccatctctgactttactggacacgtccatacctcaacatattagggtcaagatatgacaaagggccaggcacagtggctcacacctgtaataccagcactttcggaggctgaggtgggtggatcatctgagctcaggagttcaagaccagcctaggcaacatggtgaagccccgtctctaccaaaaatacaaaaaaaaaaaaaaaaaaaattagccgggcattgtggcgcatgcctgtagtcccagctactcaggaggctgaggcaagagaattactttagcacaggaggtagaggttgcagtgagcagagatcacaccactgcactctagcctgggtgagagtgagaccctgtctcaaatatatatatataaaatatatatatataatatataaaatatatataaaatatattatatatataatatatgtgtatatatataaataaaaagatataaccaagagccctgctaataggctatgtccacaaacataggccacaatgcaataattatcatatcaactccaggaatttactgatacttgggtttaaccctcaaatcaccagaaagccatagggttatactgaattttaaccgtgaaactggtagaattcagaataaaaacgaattcttccctcaatgtgacatgatacctaaaggtaccctgggtagggcgtggtggctcatgcctgtaatcccagcactttgggaagccgaggtgggtggatcacctgaggtcgggagttcaagaccagcctgaccaacacagagaaaccccatctctgctaaaaatacaaaaaaaaaattagccgggcatgctggtgcatgcctgtaatcccagctacttgggaggctgaggtaggagaattgggaggctgaggtaggagaattgcttgaaaccgggaggcggaggttgtggtgagccgagatcgcgccattgcactccagcctggggaacaagagtaaaactctgtctcaaaaaaaaaaaaaaaaagtgaactctggctgggcacagtagctcactcctgtaaatccaccactttgggaggctgaggtgggaggatcacttgaggccaggagtttgagaccagcgttggcagtatagtaagaccatgtctctactccccaactgacaaaaaattgtttttttttaattagctggacgtggtggcacacacctgtagtcccagctactcaggagggtaaggcagaaggactgcttgagattgggaggcatgatggcgtgtgcctgtggtcccagctactcaggagggtgaggcagaagaactgcttgaacccaggaggcagaggttgcagtgagctgagattgcaccactgcactccagccttggtgacaaaggaaaactcctctccaaaaaaagaaaaaaaaaaaatacagcctggtacagtggctcacacctgtaatcccagcactttgggaggccgaggcaaatcacctgaggtcgggagttcaagaacagtctgaccaacatggagaaaccctctctactaataatacaaaattagccaggtggggtggcacatgcctgtaatcccagctacttgggaggctgaggcaggagaatcacttgaacccgggaggcagaggttgtggtaagctgtaatcgtgccattgcactccagcttgggcagcaagagtgaaactctgtctcaaaaacataaaaaaataagacggacgtggtggggcgcacctgtactcccagctactcgggaggctgagacaggagaactgctttagcacaggaggcggaggttgcagtgagctgagatagagccatggcactccagcctgggcaacagagtaagactttttttttcttttttttttgagacggagtctcgctctgtctcccaggctggagtgcagtggcgcgatctcagctcactgcaagctccgcctcctgggttcacaccattctcctgcctcagcctcccaagtagctgggactacaggcacatgccaccacgcccagctaatttttgcgtttttagtagagacggggtttcaccatgttagccaggatggtcttgatctcctgacctcgtgatccgcccgcctcggcctctcaaagtgctaggactacaggcgtgagccaccgtgcctgggtgagacttcatcttaaaaaaataaataataatgtgccaggtacagtggctcacgcctgtaatcccagcactttgggaggcggaggtgggcggatcatgaggtcaggagttcaagaccaccctggccaagatggtgaaaccctgtctctaccaaaaatacaaaaattagccagctgtggtggcagatgcctggaatcccagctactccggaggctgaggtagagaactgcttgaacctgggaggcagaggttgcagtgagctgagacagcactactgcattatagcctgggagacagacggagactctgtctcaaaaaaaaaacaaagtaataataataataataatacataaagtcaaagtttccaagaacctaccaaagacgttaagtgagagcctagtgtaatggcataaatcttctatgggccctttgtcacaatgccctccttcccctgccttatctcatcccataattcaatgagcattagttagctacaataaaaaaatctgggccgggcacagtggctcacgcctgtaatcccagcactttgggaggctgagatggggggatcatgaggtcaggagattgagaccatcctagctaacacggggaaaccctgtctctactaaaaatacaaaaaaattagctgggcgtggtggtgggcgcctgtagtcccagctactcgggaggctgaggcaggagaatggcgtgaacccaggaggcggagcttgcagtgagccgagatcgcgccactgcactccagcctgggcgactgagcaagactccgtctcaaaaaaaaaataataaataataataataataataataatttgggagacattaactaacatctgccaagtctaatgactttaaagactgatctacttggttcattcctaagtcttttctactagactaccctgcccctgaccacagaacatagatgtttttctttacttagaaacgttacctaggggctgggccagtggctcatacctgtaattcgaatactttgggaagccgaggaaggaggattgcttgagcccaggagttacagaccatcctgggccacacagtaagaccctgtctctacaaaaaaaaactaggctgggcgcggtggctcacgcctgtaaacccagcactttgggaggccaaggcgggtggatcatgaggtcaggagttcgagatcagcctggtcaacatggtgaaaccccatctctactaaagatacaaaaaattagccaggcatggtggcgcacgcctgtaatcccagctacttaggaggctgaggcaggagaattgcttgaacctaggaggcagaggttgcagtgagccgagatcacggcaccaccgcactccagcctgggcaacagggcaagactccatctcaaaaaagaaagaaaaattagccaggtgtggtggtttgtgccggtagtcccagctacttgggaggcgaggtggaaagatcacttgagcgaaccctggaggtcgaggctgcggtgagctgtgactgcatcatttgcactccagcctgggcacagtgcgagactaactaaaaagaaacaaaacaaccacccaggtgtggtgatgggagattgtagtcccagctactcaggaagcttgggcggatcacttgaggctatgagccaggagttcgaagctgcagtgagttatgatcatgccactgcactctagcctggtcaacagaatgagactatatctctaaaaaacagaacacacacacacacatacacacacacacgaaacataacttagcattgtacattattcagggtacttcatgttgccaaactatgagttccttgggctaaacacaaagtaatagaaaaacaggggacttggccaggtgcagtggctcacgcctataatcctaacactttaggaggccgacgcaggtggattatctgaggtcaggagttcaaggccagcctggtcaacacggcaaaaccccatctctactaaaaatagaaaaattagccgggcatggtggcagcaggcgcctgtaatcccagctactcaggaggctgagacaggagaatcgcttgaaccgagatcacaccgggcaatggactgagaccctgtctcaaaaaaaagaattccccctactgcaaccctactgtcctctctcaagcttcctcttacatgctactgctggagatagaaataagacttcttagcctgaagtgaactatcattcgaaagcaaaacaggccaatttccaagaagttgctagtttataccttccctagttgagctattattaagtatttcctgtataagcccttctcttccatttcctgctaggtcagagtcaacaaatatccggtttttatcaacaggtttaattaagcagatcacttactatgtcagcaagatgggccaatatgtgatgatacctttgactaaagttagagtaggccgggtgtggtggctcaagcctgtaatcccagcactttgggaggccgaggcgggcggatcacaaggtcaggagatcgagaccatcctggccaacatggtgaaaccccgtctctactaaaaatacaaaaaaattagccggacatggtggcgggcgcctgtagtcccagctactcgggaggctgaggcaggagaatggcatgaacccgggaggtggagcttgcagtgagccgagatggcgccactgcactccagcctgggcgacagagcaagacttcgtctcaaaaaataaataaataaaataaaataaatagagtaggctagtgcttctccagactgcaagcaactgaaacttcaacagttttcttccagacatcccagagtacattagttcccttccatatgcttaaatgatcctccatcttaagaaaaactcaagtccgtgatcttaaaaatgagactaacttttcacgtcattcatgcaacatgttaatagctgcccgaaatagctgttttcagcagtagcccaaaaggctctctctaattctaagtcaatctccaaaaaggaatcgcaaagcatcctaaaaggttgatttcaagggaaagccaatatagcttactcataaacatctctgcaaacggaagaatgaataaacgaaatccaaagataaccctccaacctaattttagtttttagtttctgactcctcttcccagcaaacctctttcaagatttggcaagcaggccacagagtaagaaaagtaaagatttctggtgttccccaagctattacttcctgctgctttcctcaaaaactgggtaatcagctagtttacaacaatgctagtaaacaaggaaaaccctaaaggcaaagataatccacaaactaaccaagagctatatctacctgaggtcaaacataagaagagaactgcttcttaacagctcctgcttaacagtcccatccacactaccccaccccctctaaatggtggcactcattggtcacaagagccaactttctaacttcagaaaatcacctctctttcagatctttactactcactaaagatctagtgacagacttatcataccctataaacaccaaaaaataactcagagcctatttggttctttaatacactaggaataatgctgggcacagtggctcacgcctgtaattccagcactttgggaggctgaggcgggcggatcacctgaggtcgggagttcgagaccagcctgaccaacacggagaaaccccgtctctactaaaaatacaaaattagctgggtgtggctgtgcatgcctgtaatcccagctactcaggaggctgaggcaggagaatcacttgaacccgggaggcggaggttgcggtgagccgaggttgcaccattgcactccagcctgggcaacaagagcgaaactccatctcaaaaaaaaaaaaaaaaaacaccaaggaataaattatttaacaagtcttaaaatttcatgagcttatagaagacactcaaagagctcctatactctggtagaaggtatattactaagccaaggtttcaaaaacctataagcttcaaagaatgggacatcccatacaagacaacacccatatgaactcaatagccttccaaatctgtccctggccatcactaaaaaatgtgtggcatttccctagaatctgacaagataggaactccagatctgaggtaacgacattcactagcctcagcatcagttaccctctattattttagttgcctaagtgtttccttgctttgctgaactgtacagaacacaccacattcccaagagaggcaaagtaatacacattattgcaagattcctctagagggaaaaacttccaccacattaattcaagagacttaatgaaaagcacctgctactaaaattggaggcatcttattcatccaacaaatatttattaaatactctgtgcaaggctctgtatattcaatagtaaataaaataggtatggtccccatccctgcagaataaagtttagtgagacagacactagacaagtaaacaactatggccaggagcggtggctcacgcctgtaatcccagcactttgggaggccgaggcgggcggatcacaaagtcaggagatcgagaccgtcctggctaacacagtgaaaccccgtctctactaaaaatacaaaaaagttagccgggcgtggtgtcgggcgcctgtagtcccagctactaggaaggctgaggcaggagaatggcatgaacccgggaggcggagcttgcagtgagctgagatggcgccactgcactccagcctgggcgacaaagcgagactccgtctcaaaaaaaaaaaaaaaaaaaaaagctatgaatagggtaacctaatctatacctgttgtccctgtgtaaaataaaagcattcccctttactctcaaaaatgtcccaggttggactacaaatgatatggtcaccttaactgtgaaggacaaggtactatgagagagaataatgcaggcaaattacttcagcctgggtgatcagagaagacttcttggaagacgtgccatttaactgagtgctgatgggtggtaaggctccagtcattctggaaggaaaaatgttccaagtacaggggacagcacaggctatgacagggcttgaggcattattatgatcaacttcaattttgactaaataaacggaattgtcaaaaaagtgacttagggccgggcatggtggctgacacctgtaatcccagcactttgggaggctgaggcaggcagatcacttgaggtcagaagttcaagatcagcctggccagcatggtgaaaccccatctctactaataatacaaaaattgagccaggagcagtggctcacacctataatcttaccactttgggaggccgaggcaagcagactgcctgagctcaggagttcaagaccagcctgggcaacagaatgaaaccccgtctctactaaaataaaacaaattagccgggtgtgacagtgtgtgcctgtctccaaaaaaaaaaaaaatttggccaggcgtcgtggcacacacctgtagtcccaactactccagaggctgaggcacgagaatcacttaacctgggaggcggaggttacagtgagccgagatcgcgtcactgcactccagcctgggcgacacagagagactctgtctcaaaaaaaacgccgggcgcagtggctccaataaaaagaaagacttgggcaggcatggtgacgcatgcatgtaatcccagctactcagaaggccgaggcaggagggtcacttgagcccaggcgttcaagttcaacctgggcaacaaagcaagaccctgtctcacacatacacacacaaaagtgacttgggggttcccagagatcaacttttatgtgcaagattaaaatatgctaagcatgtaactgttagaactcaaaattcaaacataaagacaaaaaagaacctttaagacagtggctttcaaacttttctaagtcatgaaaccctccgagaatctgaaaaacactttagatcttcaagcagaaaatgcatatattcacgtatgcacacatccacatatacacaatttgaagacattcataggtaacgccaccacccaaaccccagcagcactattagttcatcatgaactccaagatttaaaaagtcctctttcataaaggcagaagcaagctctcaacttatttgggagttaagctacttcttaagatctactgataacatccaggaataaagagaaaaactaaacctacattttttaaaaagatatcagaacaaacaattttaagtcaattttaaaaaataaaaaatagacaacaatgtatcactaagactcaatgagactcatctttcccaccattttagagagccagatctgcccttgagtccttaccttactaacattgagtgaagctaggggaggaggggtttctgttcggtcattaattatttccacttctgaaacatactgtaagtttatgagcaagatgtctgcatggttgggctttccactggaagagggacattctggtgagaaaaaaaaaagttaaggaaaaataggacaagcagaggcactgacacatcccaaaaggggcatagaaaacacgattcacacaaggcttgtaaaaggcaggccaggagcatgagggccttataagaatcacggttctcctcaggaaatctctgcctgtcaccttcctcctgcccaaatccttggaagcttccaaaggagttctgtcactttctctctactggctttatggagaggcataatgcagatttaatgcgtttgtcttgaacctatgagccagacaaaagagctagacctttctgttcttcgtataatactctctgtgtctgcacagtattctttttactctttcagatgtgagctttcccattttgcagaggagaaaactacacactggaaaggaaattcacccaaggtgacccagccagttaatccattcattcattcacaaactcattctccaaccatttaagagcctactgtatgtcaagtaaaagttgagtaattcagccaggctcacgtgatggctcacgcctgtaatctcaacactttgggaggctgaggcgggcagattacttgaggtcaggagttcaagaccagcctggccaaagtggcaaaaccccgtcactaccaaaaaaaaaaaaattagccgggtgtggtggcacatgcctgtaatcccagctactctggagcctgaggcaggagaatcacttgaacacgggaggcggaggttgcagtgagccgagatggtgccactgcactccagcctaggtgacagagcgagactccgtctcaaaaaaaaaaaaaaaaaagtaattcctagttacaagacccttccaactaaaccactaatgtaaaaggtcttatttcttccaggtgtaacctcttatttttttaaaaaagcaactattcttaggccgcgcggtggctcacgctggtaatcccagcactctgggaggccgaggcgggtggatcacgaggtcaggagatcgagaccatcttggctaacacggtgaaaccccgtctctactaaaaatacaaaaaattagccgggcacggtggcgtatgcctgcaatcccagctactcgggaggctgaggcagaagaatcgcttgaatccgggagacggaagttgcagtaagccgaaatcacgccattgcactccagcctgggcaataagagtgaaactccgtctcaaaaaacacaacaaaaaaaaaagccgggcggtggctcaggcctgtaatcccagcactttgggaggctgaagccagcggatcacgaggtcagaagttcgagaccatcctggccaacatggtgataccccatctctgttaaaaaaaaacatatacaaaaattagctgggcgtggtggcgcgtgcccgtaatcccagctactccggaggctgaggcaggagaatcgctcgaaccagggagtcggaggttgcagtgagccgagattgcgccaccgcactccatcctagcgacagagcgagactccatcttaaaaaaaaaaaaaaaaaaaagatgccataaaaaattactcctccaaaaaaaaattccaataaacccacctgtggctcacataaaaagggaagccgtggcacatttatcccaacaaggaagtgtttcatttccaagactgagtttcctggagtaattcagaagtcacttccaccccaaagaagcaggccaccttttccaatcagtttaacattgctactttcaaaagggaggctgctactacgtaaaaggactccatgtgctggactgatcaaggcagcatgagaacttcactctttcacctgtaactcacacatccccaaaccacataagcccctggcaagccctctctggaacaggtttccagtgcaaacatcccctaaacagcaacttccaaatgaccgagaagcctaaaaatcagcacagcccccccaccacacatacacacgcatcagcgaaacaagccactatccctagctcagatacaaactctgccctgaacttactctcccccaaaacaggcaaggaccaatttggtcaccatcccaccgcccttccttggacgaaatcccatcagtgcacatgccctcctaaattccatacctttgccctaccagcagttccttaccctaaacacccctccccataatatttcacccgcccctcctttccatccgggctccaatccatcagccccctcccaccaccaccccctctcctaattactgtgtcccctctcataacgttccccccaaaaagccatccccgtgtcaagccctcctccacccactgatcctcggtaaagccccagctcccgcaaagagagagagacaggatccccaaagctgaccgaagggcccgcgggagggggaggggagctcagggccgtgcgcatgcgccccgggcgccgcggtagccggtcgcccctaggcccggagagagccccagccgccgccgtcgtcccccaccccccgaccaccgcacctacacgccggcccggactcgggcttcacgcagggaaggatacttaaagccagcattttggattggtagtcaaaggctaccacctcgccctgcagccgctgctcctggcacgtccggcacgacacctggctcccaacgctgaagtactcgcccggaggagccgccatcttgggagtgcagccgcggccggcggcggcggcggcagcagcgggcgaaagccgggcccccagtgagcgccgcgacgcgacggcgcgcacggagcgtgcttgcgtcacacgccggggcgtggcctggcgctggttggggcgggatcctaggtggagtgggaaagaagaggaaataaaggggaatctgaaaagtatttgtatagctgcgtccgctcggttaagtgcttgtagagtccattttagaagttaaggataaatgacctacgtggaatgaaaaggggaaagaggagggagctgcagtctccattatatgcacaccttccacacaagagtttaatgaatgaattttataaaatatgttaaccccattttgcatatgaggaatcagagcctcagaggacttaacgatacttggacaagatgattataaggctgggagcggtggctcacgcctgtaatcccagcactttgggaggccgaggcgggtggatcacctgaggtcaggggttcgagaccagcctggccaacatggtgaaaccccgtctctactaaaaatacaaaaattagccgggtacggtggcgcgtgcctgtaatcccagctactagggggactgaggctggaggatctcttgaacctggaaggcggaggttgcactgagccaagattgtgccactgcactctagcctgggcaacagagcgagactctgtctcaaaacaaacaaacaaacaaaaaaagatgattataactactgagtgatagtggaaagaacattggctgtggagttagataagctggaaccagaatccgaggtcagcctcttactaaatcacctgaccttgagcaagcaaattacctgatcctgtttcttcataggcatttgtattgtcacttcttgagcatctaacagccctttgaggtaggaatcaatgtcctccttttacataaactaagttttagactaaacttgtccacggttccacaactagcaaaaacagtctgcctatttccaaggacggtgctatttactgctatactctgttacataataatacctacctcatagttaggaggtttaaatgcggtaacgggtataagtgcatggcatgtactaggtctttaataaatggtagttcccccttagtcacccatcactcttagaagtcaagacacttccccttctccctttttgccctctctcccagaaagccaggcaaaaggcaggaatgaggagcagcggatagtgacaaaaaggggcttggaggaggggttttgcgcccctgcccttgaatgtccgtctgatgtacaaaacagtcgttttcttaatcttatgcaaaggactatgagcgtgcattttcaagccctactaccaccaatggctgtcgctaacccacccaccgctcactatagaaattttggatcctcgcttcatgtataagaaacaggttgacctttctctagtccagagggaagcaaagggccagtcttggcgcggcttaacctgaacaaagttcaaaagtatttccttgccctccaagaaacataaacttcctggtgttggaagtattgatacactcattataataggaataaaaattctgctccttcatagtgtgctttttcagagaacttttttttttttttttttgagatagagcctcgctctgtcacccagactggagtgcagtggcgccatcttggctcactgcaacccgcacctcccaggttcaagcgattctcctgcctcagcttccggagtagctggaattacaggcacgagccaccatgcccggctaatttttgtacttttagtacagatggggtttcaccatgttggccaggctggtctcaaactcctgggctcaagcaatcttcccgcctcggctggcctctcaaagtgctgggattacgggcgtgagccatgtggccggcctcagagaactttcatgcctctcatccttgttctggcccccataataaatcatacataattgccattccagttttccactttttatatggaatcgtgattataggttttcatataagacttctaggagccattaggaaaggccttcttggaggaagtgaaaaatctctactgagacctgaaggattggcaaggaaaaagagtggccatgttccaggcagagggaactgcacgggccaggacccctaagaggagagaacttggtgatttcaaggaatgtataggtcagaaatattacaaagcggagtgtgggagtaggctgcttaaggttgagggcaaacctcaaagactcggtaaacaatgtaggctttctcttcggcaattaaaaacttcctggtattgtccgggcacagtggctcacgcctgtaatcccagcactttgggagaccgaggcgggcggatcacgaggtcatgagatcaagaccatcctggctaacatggtgaaaccccgtctctactaaaaatactaaaaattagccaggtgtggtggtgggtgcctgtagtgccagctacttgggaggctgaggcaggagaatggcgtgaacccaggaggcagaggttgcagtgagctgagatcgcgccactgcactccatcctgggggacagagcgagactccgtctcaaaaaaaaaaaaacttcctggtgttggaggtattggtataatcattgtaataggaataaaaattctgttcactacaaaggcaataaacgaagatttatatccagcttccctcctttacacctttttttttttttggagacggaatttctgtcttgttgcccaagctggaatgcaatggcacaatcttggctcaccacagcctccacgtcctgggctcaagcgattcacctctctcagcctcctgagtagctgggattacaggcatgtgccaccacacccagctaattttgtgtttttagtagagacacggtttggtttctccacgttggtcagactagtctccaactcctgacctcaggtgatccacccaccctggccttccaaagtgctgggattacaggggtgagccactgtgcccagcaccttttttattttttatttttttttattttttgagatagagtctcgccctgtcgcccaggctggagtgcagtggtcccatctcggctcaccgcaacctccgcctcccgggttcaagcgattctcctgcttcagcctccctagtagctgagactacaggcgcgtgcccccacgcccagctaatttttgtatttttagtagagatggggtttaactatgttggccaggctggtctggaactcctgaccttgtgatccgaccgcctcggcctcccaaagtgctgggattacaggtgtgagtcgccgcgcccggcaaaaaaaaaaaaaaaaaaaaaacttttcaagaacaaagttgattgaggtaggaagaaactaaggagacactgttcaacagtattctaggcaggacctcgcctagaatagctgagatttctattttctatgtgagttcccccagatgactgtttcaaactctgtcgcgggtgtgtgccaatcctcttcccataccaacactgttactatctcttggtttcatctgcctaagcagggttttggatggcaggaggatgggggtgggggaagcaagggaagaactggaaggaagtgtgactttgcgctatatgtgagaattcgcctttttagggaagacccctcaaaatcaagagacttatctgtcagcctccagattaatagcaggcgaattagaaagggggagtcttgaggctggggaggaaggagtgaactgattaggggtgtatgcaaatttaggatcccgcttcagctcccaggaggaggggctgtctgcagccttttctccaaaggatctcagatttatttatttttttgctgtttgtttttttttttttttttttggtgggtattggtgctggagaagagaggtccggtggggaaagaatcccggccctggagattatatatccgccttcgcatcagcggagcagggacgctgggagcgcgcgcggcccgccggctagtcagtcccctgacccggaaccgcactggtgccgccgctagccggctgcccacgtgcctgcaacagtggccacgtggggccctgaggaaacgcctttacaaaggtttgtcccctgcgctgcccagtagggaggaaaaccggaggagagcgcaggaggaaacagtaccggctggaggccggtcttgcaggagcgggggactgctgggggcggggcttggtggtgaccgctggcggggcggggcctggggctcagaggggtgggctttggagatcagagggtcgacgctgcttcgttgcctggactctggtttccgccctggagcaagccggggcctggtcggcagctgggccgccatggagtccacgctgggcgcgggcatcgtgatagccgaggcgctacagaaccagctagcctggctggagaacgtgtggctctggatcacctttctgggcgatcccaagatcctctttctgttctacttccccgcggcctactacgcctcccgccgtgtgggcatcgcggtgctctggatcagcctcatcaccgagtggctcaacctcatcttcaagtggtgagacagagaagccctccggcatcctggtccccacccccgagggccctgagtcatgtgtaagccctggtctctttcagcaactgtctcaagggccttcccacccctactctgtagtccctgattttttttccccttgagcatctttgtgcagcttggactcaaacctcagagtccaaccatcctactcattagaccagtgttcttcaaactggtctgatggaaaaatcacctaaggggcgtgtctaaaatgtaaatatcccatcctcatctcacacttactaatttagaaactccaaggggttgggaatttattttttattttttatttttggtttatgggaattcatattttaacaaatatggtgatttaagtagtggagagtcctacctctcaactcactttttcattcatgtattcattcatttgctataatttttcagaagcatgctttgtgctgggcatcacggtagctgctaaggacagagacaccttgcagattaaggtgtggtccctggaccatgcccaacggcataggcagcacttgaaaactggctaaaaacgcagactctcaggccccgggccagagctactgaatcaaaatctgcattttaacaaggttcccaggtgattccctgtgcgtatgcagtaaagtttgggctaaagcactgctttccagggaacactttctcttctttctctttcattcaccagtagactcttcacactgagacttagaagccaggaatcccagggacatgggtggaggccctgtggcccctggggctgggcatgcagccacacctcccttcacctcagcctctgttgccagatcctcagcctgggggaaggaagggaggctcataggaggtatttcaatgagctggaatgacttgctgaaaaacaacatagagttcccctcccttccactcttttccacgagggcctcatccttatgtaaagggaaccacagtgatctgttcacttctttcttgcctaattgccctttgctttgtgctctcctctctcaaagtctgtataagcctccccctctattccttgtcccccaaagatcacaatctccttcagacactattaatgtcccccaagtggcaaagtccctattcattttcattttctcttttttttttttttttttttttgagacggagtctcgctcagttgcccaggctggagtgcagtggtgcaatcttggctcactgcaaactccgtctcccggcttcatgccattctcctgcctcagcctcccaagtagctgggatcacaggcgtgtgccaccacactcggctaatttttgtatttttagtagagaaggggtttcgccttgttggccaggctggtctcaaactcctgacctcaggtgatccgcccgcttcagcctcccaaagtgctgggattataggcgtgagcaacctggcattctttttttttttttttttattctttttgagatggagtcttgctctgttgcccaggctggcgtgcaatggcatgatcttggctcactgaaacctctttgtctctcaggttcaagagattcttctgcctcagcctccccagtagctgtgattatcggcacccaccaccacgcccggctaattttttatttctagtagagacagggtttcaccttgttggtcaggctggtctcaaactcctggcctcaagtgatccaccctcctctgcctcccaaagtgctgggattacaggcgtgagccaccgcgcctggcaccgccgttcattttctgtgtgagcacttgttgtatatatactaggctcagttttcagaggggagaggcaagtgccttctgtatatccctccccagcacgtggcttcctgccagcatctcttttgctatcccatcttttctctttctggccacagcagcctcttcattgtgtggttcccagggcccagccaagcacttgctagaccagaggattttgacatttttttgtcctccttattctttctcagccttctctgtccatttcccacccccattttcagacctgagaggctcacctaaataatttaggtgtggataattcaggctgtaactggggacatggaggcaggggtagcaggagggttagtgagggcctggaggagagagctgggtcctggactctctgtggatgataagagctggccttgcagtgagagggggtagagtgggacggctgagtatctcagagcacacacacggcttaccacaatctcttgcctctgtatcagttttattttttattttattcactttttctttttttgagacaggatctcactccatcaccaggctggagtacaatggcacaatcacagctcactgcagcctcaacctcctgggctcaagtgatccttcccacttcagcctctggagtagcagggactacaggcacaccccaagatgcctggctaatttttgtattttttgtagagatggggttttgtcatgttgcccaggctattctcgaactcctgggctcaagtgatctgcccgcccagcctcccaagtagctgagactataggtgtgcaccaccacttccagctaattttttgtttttgttgaatctgggtcttgctatgttgcccaggctggtcatgaactcctggcttcaagtgatcctccagctaaggcctcccaaagtactgggattacagtcatgagccactgtacctggccccagactagtttttaaaaatagtgtttccacaggctgagggttaggaaaaaaaaaagaaaagaaatagtgtgctttctttctcctgttctaaggtagaaaaccatggcaaggtatccatggataccttgagagcagtggacagaatcgtagtccctttttgacttcacccctcaggccctccagagtactctgtgtcctgcccgccttgtaccccccctggctgtgtgtgcatgtggaaagtcatcttgcatctgttctcttccaggtttctttttggagacaggcccttttggtgggtccatgagtctggttactacagccaggctccagcccaggttcaccagttcccctcttcttgtgagactggtccaggtgggaagcctcaaacattctccctttcccaatgtggttagggttcgggtgaacatttcagagtacttttcagcctgggtggcccaaccaaaggaccagcctctcaattactggcgcagagaacaaaagaaccccagggagaccaagctgagttatgggaggagggcactcatgctatgtaccagctgcccaccttgtatagaggacagccaagagacacagatcaggacagaaacctgagcacagtgacctcaagtggcagtaaaaaggcctcagagcagagcgagttatgaatcagtgctggggaaaagctcttctcagccaggaaaggcagctgtattattgaggcatcaccaggggccccggggttctgcctccatcttctcaccacgagcttctggatttgctggcaggcagcccttctggacactgcatgatcacaggagcagccctctggcccataatgacggccctgtcttcgcaggtggccactcgggcccgcaggtatacccttggcattgcccaccattgggagcaggggtgatggcaccctgtacctaatagacacagcagcatggcagcctgggagctggagttttggggaccctaggttgtgtggttcaaccatggagtacctgggtgctgcaggaggccaagctgtgtatggacacgctctgagctccttgcctctcttctttctagccgctgggtaagggtgatgcctagcctggcttattgcaccttccttttggcggttggcttgtcgcgaatcttcatcttagcacatttccctcaccaggtgctggctggcctaataactggtgagcaactggggcaacggggtggactgagaggatgcctttggcagtgggaggatcagtctaggatcttcccatcgctcccagcttctgtagagcccaccccagaggccccccgttatgtctcagtttattctcttgccaagctgcactgcagctgggggtcggggtggggagggtcatatccccagactccttgaagctgttgtcactccactctcctaggcgctgtcctgggctggctgatgactccccgagtgcctatggagcgggagctaagcttctatgggttgactgcactggccctcatgctaggcaccagcctcatctattggaccctctttacactgggcctggatctttcttggtaagtctcgctttgaagcctgggcaggctgggccctgtcctatctcgcctgcacctagcctggtgtgtctctggttcattatagctaaaaaaggacacattacctattcacatagaccctcacaggcacaaaacagaacatgggagtgggccccaagggcagatggccaagagccagtggccttctatgttccagcctctcctggcaagaactcttcttccccacaggtccatcagcctagccttcaagtggtgtgagcggcctgagtggatacacgtggatagccggccctttgcctccctgagccgtgactcaggggctgccctgggcctgggcattgccttgcactctccctgctatgcccaggtgcgtcgggcacagctgggaaatggccagaagatagcctgccttgtgctggccatggggctgctgggccccctggactggctgggccacccccctcagatcagcctcttctacattttcaatttcctcaagtacaccctctggccatgcctagtcctggccctcgtgccctgggcagtgcacatgttcagtgcccaggaagcaccgcccatccactcttcctgacttcttgtgtgcctccctttcctttccctcccacaaagccaacactctgtgaccaccacactccaggaggcagccccatccccttccagcccctaagtaggccctcccctccctaaatctgcttccgcaccacctggtcttagccccaaagatgggccttctctctcccagataagttggtcctccctctgcctttcctctcaagcccccaaagagcaaaggcaacagcaagaccagcgggttcttgcaacactgtgaggggcagccagggcggccccaataaagcccttgaatactttgagattcctttcttgcctatgcgcacatctccatgggccttgcctgtgtgtgcacaagtggaacctttgccaggctgctccagtagtctctgtgccatctccagccctgtttccaggggcagagaggcaggaaaggagagggctgtaaactcaggtgagacctctcagccctgggtcccctgcctcatcactgcctaggccacatgagaggtcccatgagatgctgtgactatattcggtataaccctgtcttttcacttacaggacagatcttgcgccccaacctccagtttcctaaatcggcttctagtccaggggctggagaaaagagtagtgtgtttggctaggaaggaggatgagaacctctactccatttgggagcccagagaatagagacattggccccagaaggcactgccagaaacaagtttatttacacaaggacacacagtgtaacgggttacaaaatacttaactgaaatccatatccagggagacaaagcaaggagtgggtttacatgagaaccagaccagccacagggagagagtgggtaaggggccgggagcctggggctcagcacagagaggcctagtacactgagcctggccccatccccatcccccaggaggatctaaaacaaacacacaagcacactatgaaccgatggtgctgggactcctgcccctcccctggctccctcaatcctgctcaggcccccataggataataaatatgtaaacagattggtggggccctggagatagaaggagagaaagtatatgtggtactggggaggaggaggaaggaagagtcagccccctaggagccacttcccatctttggtttcctacaggctggatggcatcccctggaagccttgtaggcccacagcccctggcagggctcctgggaaagagaagggacagcgcccagccccctcctggtcttagctcccttgggctggtggtcagcaaagggagcccagaaggtatggaagctccagctgagagccgactcctggatccctgggttctggccttaccccttctagaacctccattctcaccatccccaggatccaaaacaaaaggccccaggagggaggtgagcctctgccccttctccccgcagcatgctggatggctgggaaaatctggtcctgacagcaggggggctctcaccagcctggagcccctctgcagggaccaccttctccccttgcccaggctgtgccagcagaggggcagggaggccatccgagtaaggtggggagcagacctggttctgttactcctcctggcccctgagaacccaggaaaccagtcctctccttccccacacactttcaccctctcagccccggggaaggggaagtaggctgtgaggagtgtgaggcaagacagccctcctcacagactgcaggccacagcttgggcaccagcctcccatcagtgctgagaccaagaggaaggaggaggagaggggtctgcagagatggtgaggacgaaagaaggggaaagggtggagaatcgcagggtgggtgcccacctcccctccactctgcatcttaaagacagtagtggatcctccagatcctcccctgaggctggagaagggaggagagtgaaattaaggcatttccccccaaatcagctgaaaccaaggcaccgacttcccgttccctcctcactcggggggccccagaactggagagtactgtctgggcccccgtgcccaccttgagctggcccaggctccaaggaggaaaaggacagacagaatgcaggaaaatggggggagggacacatgggacagggctgggaagacaccaccaccccctgcagagggagcaggcttctagagctgaggtggaagccacagggctgggggcctgaggcagcgtagaggagcaggaggggcaaggctgagagacccacacggcacaccttgttgaatgtgtgactttttgtttttaatagaaaaaataaacaaaatcacaatggtgaagcccagagggatgggggccggggcgtcacagggcaggctcctgctccatgggctcctctgccggcctgtggggcaagcacaggggagggtattgagtggggcgcaccagcaggggtgagggcagagaggtggtgcgggttgctgcttacctggggctgtgttcccgggctgccgcagcctgggcctgctcggcccccaccgacagcaaggccatggcgctcacagtctcggcctcctcggtctcacctgcttgggcctctcgcagggaccggcccagaccagcggcgaacttctgcacacagctccagtgtttgcctgtggacgagagacaggcaaggggtcagggagggcagaggacacccacatgaacagtcccagtcctggtgctcccacaagctccgtgcccccttggcagcctgagcccctctacgtgtcctcacgcactctggatctcgatgactttctctagcgtggccactgcgttgatgttgggcttttgctgcaagactgcctcatccaagggctgcagctggcaggggaaagaagagaaggcttagggtggggagtagggttgccatgcatacccctctaactgccccactcagccccagatatccctcacaacaggggcaaacatggcctttttggacaaacgcatactcagaaagcctggccattagctgttccttaggaccaaggaaaagcttcctaaggggctcccagtgctggctgaccccttgctggcccctcagacctctggcctgccacctcccagctccttcccaccccttacctctacactgagcagagccgagacacaagcctcagaggcatcacagatggcggtcaagtcatggcctccctccagggccagcaccacccggccccctgccagggtcatcagctgcctggtcaagtggccaaaacctttgaggatgggtgaagggaggaagaagaaatggcgaaaggtaatcaatcaattcaagagccagtaagaggagagaaaaaaggccaggcgcggtggctcacgcctgtaatcccagcactttgggaggccaaggcgggcagatcacaaggtcaggagttcgagaccagcctgaccaacatggtgaaaccccgtctctactaaaaatacaataattagccggccatggtggcacgcgcctgtaatcccagctacttgggaggctgaggcaggaggatggcatgaacccaggaggcggaggttgcagtgagccgagatcacgccattgcactccagcctgggtgacagagtgagactccacctcaaaaaaaaaaaaaaaaaaaaagaaagaaaaggagagaaaaagaaacacaagaggtgggacaaatagcacaaaatgtgatgggagatataaacccaaatatatccataataaaatacagcatcagtgaactaaatgccctatcacagtcaaaacattaacagactggctgaagactccaatccaatgacaaggagcatcactgaaacaccagggaccaacaagcccatctctacagctccggcaggatacatcctctatcctctgctaccccactgccacctcctatcccctcaaggccggggttggcagaggacaagttgggggagttaccaagatgattccaagtctaggccctgccccctgctttccccgtctgctgcaatatcagtctgttccctgccccatgcctcactggactcgatatcctcactgtttcacttcctccctcaatcccccagcaggcttacatctggcggtgacagagtagccacccagaggagacagatgtccttcaacagcatcaaacccggcggagactaggaccacatcaggtgagaactcgtgggcaatgggcatcaccactgtcctgcaaagggatggctcaagctgagcccggcagatgaccaggccaggcctcgccccactgttatcctcccagagacaaccccctctacccacactgaactgagtgccttctgcccctcccactgcagggcccagaggggctcccactgactaccatggcccttttcagtccctacctgaaggctgtaaggtactccacgtctccaatgggggggtccacacctcctgtccatgccacgttcacattgtaccccacgcctggtcctccaccaacctggcaccagagttggggagagggctattctcaccacctgggagtcccaaacattgcccctgccctcacccctgcctccagatctcactccactgacctctgctctgcctggaggggcagtcagatcagtgtggtcctcccactaggagcccagactccccaggtaccaacaccaccatgggcctccgtggctccccgccaggtcccattgtgccacctcccagaggggccaggagggtctgcatttacgcccaggagctgtacctcttcaggagccccagagcctggaaagaagttcccgttgtcatagcgatgcagagagatgtagagcacagaggggtcattgtagaacgcctgctgggtgccattgccatggtgaatgtcctatgaggggaggtagaagcatcgggaaaatggcccgcgctctgacccaatggtcaaattccacctgtcagctgagcactgtagctcatgcctgtaatcctagcattttgggaggctgagggctgggaggatcgcttgagcccaggactccacccttggccacagggcatccatattctgttcacaatggtattgcacaccccacacttctctaactaggtctgagcctctgtggggtggcactgtgtaggtgatattcaaaaccatgggataaatgtggcatatctccctacagaacccattccacctcacagttttggggaaaacattaaggctagtagggaatttaaaacaggcagatgagattctttcttttttttttttgagaccaagtttcactcttgttgcccaggctagagtgcagtggcacgatctgggctcactgcaacctccacctcccgggttcaagcgattctcctgcctcagcctcccgagtagctgggattacaggcgcccaccactatgcccggccaattttttttgtatttttagtagagatggggtttcaccatgttggccaggctggtctcaaactcctgacctcaggtgatccacccacctcggcctctcaaagtgctgggattacaggcatgagtcactgtacccggccttttttgttttcctttttcttttctttcttttttttttttttttgagacagaatctcactctgtcatcgaggctggagtgcagtggcatgatcttgactcactgcaacctccacttcccaggttcaaggaattctcctgcctcagcctccccaataggtgggattacaggctcccgccaccacacctaactaatttttttgaattttcagtggagacagggtttcaccatgttggccatcctggtctcgaactcctgaccccaagtgattcacccaccttggcctcccaaaatgctgggattacaggctttgagccattgtgcccaaccacaagcacgtaagattctgaaggaggatccaacatttacatgaatttttaagccagaattgggcttccaagagattttgtccttcctgaggcttggtcctggctacttccccagctcacagagagtggtgtgtgcctctgcctccaccattaggagcagggtttgggaagcacccatggtagcaagagcagagtgctggggccaaaagccttggtctgaaacccagtgccgacatccccagctgagtggccttgggtaagtcacgcaacaacacctttgttcacagaaatggacatcctcgttcttactactcgaggtggccataaagtactcattgtgttcctggtatacagtctgctcctaattgtagggggtgggaggaaatatcggctactagcaatggcggcagcgtcactaccgttcaaggtaggaaatccccttcgttgcttgaaactgcaacgtgagggccaagatggaacaggagctaaatgtctttcatagttgaggagggagccctgttggaatgtgacgttagtcatccggcaggagccccagcgcccttccttctgcacccacacccagcacccgaggatgaggacgactggggtgcttgaaggtggggctgggggaggagacttcctgaaggctgaccctggtcctagctctacccgcccctgcccagccccaccagctcactgcctacccagtccacgatgaggaccttgcccacgttcaacttctgctgtaggagttttgcggtgatggctacagagttgaagaagcagaatcccctgaggaggggagaaaagggcaggaggtcagcctcagcatgacgtttgcaagagacaggaaggggcgagggcagagaatctagggcactcacatggctgtggattcctcggcgtggtgtcctgggggccggatgatggcaaatccattctgaagaggtgcaggcagaggtgaggggcaagatccaggcaggaaggccgtggagggggtagcacaggacagaagcacaagccaggcagggaagtgaacacaaaccagaaaagcagatccatatgtttaatgcacaattttgttggggtttctttgtttttttatgggtttttttggagacagagtcttgctttgtcacccaggctggagtgcagtggcgcgatcatggctcactacaaccttggcctcccaggctcagacaatccttccacctcagtctcctgaatagctaggactacaagcacacgccaccacacctggttaattttttgtagagacagcgttttactatgttgcccaggctggtctcgaactcctgggctcaagctatctgcccacctcggcctcccaaagtgttgagattacaggtatgagccactgtgcccagcctcaacggaccattttgaatgccaaccatgaggcttgagcaggcagacactatttctgcctcgagacacccacgagagcactgggcattagtgtctttttgttggtccctcataacctgaattcccagctggcaactccttcccaccctggtgcctgagagttgagcttgcaaaggacagtgcctcactgaaaggatcccaaggctgcccctgtcctctgcctctgaggagcagggccatgccaaggggcaccgaggtcacaagcacacgctcaccttgagctctcctgcagccaccttgaaggccagctccagcaggcagcccactgccatgcgcacagcactggaggagtgcatctcattccacacggtgtcactgtccacctgcagggcaggagagcaggtttcagtgtgccccctgcagggcaagaacaggggagggcacctggacagtgggccagcggctgtggtaggcagggaagagacagacctaggagagccgcccgcccacccccactgctgtacgccctactcaccccgatgcccccacaaggcagcacagcatacatcttctggctgatggggcctgcatggaagaggaatagagctactctagaagtggcctcgggcggatcacctgaggtcaggagttcgagaccagcctggacaacatgatgaaaccccatctctactaaaaatacaaaacttagctgggcgtggtggcacacacctgtaaacccagctactcaataggctcaggcaagagagttgcttgagcctggggagacagaggtcgcagtgagctgagatcgcaccactgtactccagcctggccaacagagcaagactgtctcaaaaaaaaaaaaggcacctcaactgccacagggctacaggcttagccaccaaaaatgagggctcagacccaagtacaagacaggcctctgcagcccacaccagttggaagctgtcagtcctctgtccttggggacgtcttacctctgggggcaggtggcagggagagaggagcatgataagccgtggaggaggggaacaaagcagtccccccaaccgagcacttccatcctcctgcaccgcgccccacagcatgctctattttagtggcgccctctggaggtgtgtgacgtgataattgtgccacctctgccgcagcaatgccctatgcccgtggggacaaccctcctagcctggtcaggcagtcttcctgagagcccccatcccaccctgacactgaacatgcctgcccgcccacccatgtgccagctcaccgagcaacttcttgctgtctagcttctgccggttgaggggactggtcccatagagcagggtgtggtattcagagtgcactgtctggatctcatctagcgtggctttgcgacctcggatccgctgccaggaggatcagtaagaggggtcacacaaaggcacagctctctcagagcctctctgccccatagccagggcacacagagccacttcctggcctcaggagatccaaatattttcagaaagtagatcctggctctgtcatgaccttactcccggatcccccccactcagctggggaccatgggggaaaacaggctgcaagggatggaacggggtggtgggagaactggccccgaagtctggggctgaagagaggatgaggaagaagcatgaagagaggcttatctaacagggaaacaaaggctggatttaagttgagagccagaagaaggaggggctcccttacctcgcacttgctaagcaggcctgtctcctgcagccgggaccagatgctctggatccggccagcatgctcagggtgcacgtgtgtgttcccgcacatgcactggtgctttagcatgaacgtgtcgtagaccacacctgggccacagacctatgtgtcagccagcactgctctgggcccaggatcccagcctggctaccatgatcctcagcagggctcatggagctgtctccaacccccaggtccaaacacctccccatggccactgcagccaccctgccacaaacctgccccctctcctctccagcttttttttttttttctttgaaacagggtctcactctgtcacccaggctggagtggagtgtgtagtggtgctatcatggctcactgcagcctcaaccactgcccccaccaccctgggctcaagcgatcctcccacctcagcgttctgagtagctgggactataggcactaccacacctagcttttcttttgtttttttttgagacagagtctcgctctgtcggccaggtccagtggcacgatctcggctcactgcaacctctgcctcctgggctcaagcaattctcctgcctcagcctcccgagtagctgggattacaggcatgtgccaccacgcctggctaatttttgtatttttagtagagacggggttttaccatgttggccaggctggtctcgaactcctgacctcaggtaatccacccacctcagcctcctaaagtgctgggattacaggcgtgagccactgcacccaacctatttttttattttttattttaaagagacggggtctcactatgttgctcacgttggtctcaaactcctgggctcaagtgatcctcccaccttggcctcccaaaatgctgggattacaggtgtgagccactgcacctggcctttcctctccagcctttgccccctcttgactcctcctgaaattcctttgctccattattgcctatcagaagcttccctgctcctcaagccccagcaaggctgccctggacactcgcatgagtctcatctctgccagctgtgcctcctcagctgcacccttctcacggcacctcctgctttccccctcctgccaaacccgtgtcttactctccacgggtgatacagggccaccctcaggcacgtctgtgtccccccagagcccagcctgtggcagcttcatagggaagaggactctggtctcatcccagacctcacagggagaaggaagggaaggtagaaggtcagggcccaacagggacagcaggctctctctacccagcacttcaggctgtggggcagtccttccttcagcggggtgagaaagacgctacccactctcccggctgaggcagaaggccctgccgctaccatgaacagctctggggtacagggagagaacgaaggcctgtgtcccctcctttcagggtgcctaaggggccccagcagcctcttccccctgccatggggcagacaccacacacaggccctctggtgcctggcagaaggacctaacagttggtgggggctcacctgtggtgaagaggtgcttgacgggctggtctggggggctcttcatgcccccaggggcagcaggggaggactgggtacggcccagggcctggtggggcacagtggccaggctgaggggcgcctggtacacctgcaaaggctgcagcggctgggcatctgagaacagctggaggggagaatgggagggggcctgggtcagactcagccaggacaggggtgagggcaggccctgtcagggcctccagtggggccccaatccagcccttttcttccaagtctccttcccccacctcctcccacttgctccctccagggacaggagacacatctcctctgagatggggagggatgggggagatgtgatgagtcacatcaaagagtagcattgaggtaagaggctgggaggggtgggggcgggggcggggtgggggcgggatgagtcaggcccggagggctcggctgtgtccgcaatgaatggagtgccagctaggcgcgaggcagacagtagtaacagcgggggcgtgtgtgtacacacacgcacaggcacgcacagggaccgacgcatgcatacacagacacacaagcagagaggcaggccagtatcacagacacagggagggaactggcagcctaggacagacacaactctgagatcaacacaaacagctcccccttctccccaccggcctccttcccactccccttttgctctctacagaaagctgctcctgcacagcctggaaactgcagatgggggagagggaaagacaagggcagaggcaggggtggagaaggacagaggggtggtgaccaaggactgggaccagggacggggctcacttttttgtatccagcaccaggctcctccaagtcgggcccctcctcagcaccactctcgccctcctcgtccttaacctggatgcaatcctcctcctcctccccatcgtcttcctcgtcctcctcctccaggtcttcctgtgtgctctcactctctgtggagccctcccggggcatggtcagggctccctcccccagcaagacctcctgctgctccgtcagctcctcctctgtctcctcagggtgggtggtgggctgcctgggcagctcccctgtcttggtgaggatctgataacagaatatgggggcacatcagctgggagttggggagcagctgtgcagcctaaaacccagaacagtctatccttccctccctcccttcttccaggtagagcttctatgtgaattagaaaaaggtgaggtagctcctctgagaggactttttttttttttgagacagagtctccctctgtcgcccagcctggcatgcagtggcacgatctcggctcactgcaacctccgccttccaaattcaagcgattctcctgcctcagcctccccagtgactggggttacaggcgcacgccaccacgcccagctaatttttgtttgtttttttgagacggtctcgctcttctcacccaggctgcagtgcaatggtgcgatctgggctcagtgcaacctccatctcccaggttcaagcaattctcctgcctcagcctcccgagtagctgggattattataggtgcctaccaccacgcctggctaatttttgtatttttagtagagacgggggtttcaccatgttggccaggctggtctcgaactcctgacctcaggcgatctgcccacctcggcctcccaatcaggcgcgagccaccgtgtctggcctgaaaggaggacttttctgccagcctggtactctcctgtgtcctgcccccaccacagccccaggccattcacctttccaggctcaccttgcccagctgtagctgctgctgcttctgcttctccaggaactgctggtgctgttgttgcatgaccagctgctgcagggcctggggactctgcggcagcggtgaggactgagtgcggctcaggggccgatgccgcgggagcttgcctaccgtccgcatgctggtggccacacgttcacccgtcactagtggggactgcccgtggagtggcactacggagttgggggtgatgactaagcaccattgtcagggcacctgactgccctcccaccgaccctgcatcttgcccccacaaccccctctggcatatcaccacctatatactcaggaaaaaccctgggggacctgaagcaccccccacccaaacctgagctccattcttcctcttccccatgaatgaagagtttcacagctctaaggtaccacctccagcaagccttcctggattcaccatcttttcccttcgatttccttaactgaataaactgagtatacatttagtcttgagccctctgaacgaacaatgacttttctccctaagtgcaacaaggcctccctgatcatggatcctccccgtggatcccgccaggctaggaagccctagggccaggatcatgtatctttcaagcagaacctcttctggtgccagggctctttagacagccctggtacttaagggctgtctaaagttgtgctgtctagtcccatagctactagttacatgtgactgctgagcccttgcacacaacctgtctaaactgaaatgtgatataagtgtgaagtatacactagatttcaaagagtatgaaacaaaaaccaaaatatctcattggtaactgcatattggccaggcacagtggctcacacctgtaatcccagcactttgggagtccaaggcagggggatggcttgagcccaggagttcaagaccaacctgggcagctgggtgcggtggctcacacccgtaatcccagcgctttgggaggccaaggcaggtggatcacttgaggtcaggagttcaagaccaacttggccaacatggtgaaaccccgtctctactaaaaatacaaaaattaggccaggcgcagtggctcacgcctgtaattccaacactttgggaggccaaggcgggtggaccatctgaggtcaggagttcaagaccagcctggccaacgtggtgaaacttcttctctaataaaaatacaaaaaattaagccaggcatggtggcacatgcctgtaatcccagctacttgggaggcttaggcaggagaatcacttgaactcgagaggcagaggttgcagtgagccgagatcttgccactgcactccagcctgggcaacaagagtgaaacttcgtctcaaaaaaaaaaaaaaaaaaaaaaaaaaattagctgggtgtggtggcacacgcctgtagtcttaactactcaggaggctgaagcaaaagaaccgcttgaagcttgaacccaggaggtggagggtgcagtgagcagagatcctgcttactgcactccagcctgggcaacaaagtgagattctgtctcaaaaaaaaaaaaaaaaaaaggatgagcatggcggctcacacctgtaatcccagcactttgggaggccgaggcgaacggatcacctgaggtcaggagttcaagaccagcctggccaagatggtgaaaccccagctctattaaaaatacaaaaattagccaggcgcggtggcaggcgcctataatcccaactacttgggaggctgaggcaggagaattgcttgaacccgggaggcagaggttgcagtgagccaagatcacgccactgcactctagcttgggcaacagagcgagactcagtctcgaaaaaaagaccagcctgggtaacatagcaagatcctgtctctacaaaaattaaaaaatagaaagaataactgcatatgtattaccgaaattgtaatattctggatataatgagttaaatatatgtggtgaaattaattccacttgcttctcttttttttgagacagagtgtcgctctgttgcccaggcttgggtgcaatggagcgatctcggctcactgcaacctccgcctcctgggttcaagcaattttcctgcctcagcctcccgagtagctgggattacaggtgcccgccaccacgcccagctaatttttgtatttttagtagagatgggatttcaccatgttggccaggctggtctcaagctcctgacctcaagtgatccacctgccttggcctccaaagtgccgggctcacaggcttgagccaccatgtgtggctccacttgcttcttttaatttttttatttttttgagacggagtctcacgctctgtgccccaggctggagtgcagtggcacgatctcggctcactgcaagctccgcctcccaggttcacactgttctcctgcctcagcctcctgagtagctgggactacaggtgcccaccaccacgcccggctaattttttgtatttttagtagagacggggtttcaccatgttagccagaatggtctcaatctcctgacctcgtgatccacccgcctcagcctcccaaagtgctgggatttcaggcgtgatccaccgcgcccggccttctttttacattttttaatgtggatgctagaaattacgtatgtagattgtgttatgtttctactgaacaacactgctctgggatgtgaacgccaagatggcagcagattttgtcaagaacagtgcctggcatcctgtaggtatcccatgtttccagaatgtggaagaaatcactgatgctgttgattctgctaaggggaactgtgacagggttggagagtatccctgacagttggtcctgaccttagccccctcccttgcacagctacctgtccactcaccagcaatgagggtgctctgctgccgggcctgctccagcaacagcacatgctgcagcagggaggcatgcccgtgggggctcccgtcgccctccagtgccacgcccagcaggcagccaggaatagaggatgtgctcatgaacttgccggtcagcgtgccaccctgccgcagggactggagggcctgcctctcggcctcctgctgtgtcgacagcttcggggaggcctggggggtgaagggaggggcttatacagcctcagtcctgccaactttggactagcatccccatctacccactatctaccccccaagctctgggtagggccaacagatctcccttagggccttggaaggggaaaaccccagctgggggcatgcaggacctgtgacctcaacaccagagggaagatggggtatatgccctgtacttacagtgaggtgtgagttggtgacagtgaccgtggcctgcagccctagggagatgttgggcagagaaggagacgtgtagaggctgaactggttgggggagctgtccagagggagggctcggtgctgagggagcatctggggagcagtcagaagagacaggcatgagagtgcacaaaggggaggcaacaagggagggcaacctggggccaaggccaaggtctctgaatggtgcccagttccctctaccctgagctcccactgagggagactgagccatcagggctcttcatagtcctgtgggacaaattccccttcaatgcaattaagtccaagcaaggatcctccagcctattcatgtgggcagagaggtctctgctgggcactcaggcagacagactggaaggagctgcactctttcttccatgggaaggagcaactctgtccccgccccaccagcccccagccaggcctgtacctcagtggggatgttggggactgagccagtaaagccattctcagcgatggtgctgtgggagctgttgggagagctggggccggagccgggtgcgctgttacacacggacgacgctataggagaagtggctgtcacctgggcctgctgtgaactacccccgacccctgattcccagaccctcagaacaggtacatgagagcagcccttacccccaggcccggcacctgtgatctcaacagctctcttcttaaaggtgctaataacagtcccatccttgcgacgcaggaggggactgcttctccgctcagccaccttctgttttagccttgaacgcactttcaagttgggttcagaggctggagagaaggtaaccgaggttcagatacgcgcacagcagcacacatctgcagctgagcccactggggtcagggctgacactgccacaagcccacctctgcctcccaggagccatattctgggaggccaggtgggggactcactcacctgttttgcggagggggaagtcgtctcgactgtcgtagggcccaggcaaaggcagtttgtaggagggaggcgtcccaggggggccgctctggggaggggaactctggtccaaagaagcatggtgggctcccctggggtggggggggggtggggatggaagcagatctaggttatcacccagtctgctggacctgccacctggcaatctacatttatgaaaaatcgtttgtatataggaagaggacgtggatcttggggaaggaatgaggaaataaaccagggatgggggtcctgtctctaaggagagattgcagggcccgtatatgggcacggggaagaagccccttgccatcctatagccaggcagcccctgagcggctcacctatgcccacccatgcctgcccagggccattaccagcatttggggtgctgtgggagggaatggttgaggccgcctggtgtgggctcctttgacttcgacaagaggaattcctggagcctcagctttacctcagtgctggcaatggcacctgcaggacagggcacaactgacctggctgcttggggccagaccccccatggcaggggcaggcatcacgggcggggccctacgaggtcccaggaggccctgccttactctctttgctcttctccttgttccgcaggatgagcagctgctgctccagccgctgcttctccagctcttcctgccgctgctgctcccgctgccgctgctgctccagctcctgctgccgcttggctgccagcatctcctgctgctgcttggctgccagcatctcctgctgctgctgcaggggcatgggaacggaggcacaagtgagccaggcccgggcggggatcggaggtctgggcggccccccgcacccccctcgctcaccttgaggtgcttctgcagctggacctcatgctgccttgtcaggtggtcatgctgtttctggaactcagcgaacaggagctgcttctgcagctgctgctgctgcttgagcgccaggagctcctgctgcagttgctgctcccgcagtgtggggtccacagagcccaccagagccccccgtagctccacagggctggggctgcctccacccccaccccccatggaactgggcatggctcttggcagcaccggcttcacctccactgtgggcagaagagacaggaaggagttagtgggcccagccccagactccagtcatgcctgaggcccaaaggctaccacgcaggattctaggagacccaaagagaacagagacagagaggaagtcaaatccctctgctccatggatgcaacattttaccttaattaaatgaggctgaagccatgaacttcaataggaaaatacaggctgagcacggtggctcacacctgtaatctcaggttagtttgggaggctgaggcaggcagatcacctgaggccaggagtttgagaccagcctggtcaacatgatgaaaccccctcactactaaaaatacaaaaattatttgggcgtgatggtgcacacctgtaatcccagccactcagatggctgaggcatgggaatctcttgaaccccgggaggcggaggttgcagtgagccaagatcatgcaactgcactctagcctgggtgacagagcaagactgtctccagaaaaaaaaaaaacaaaaaacaaaaagggggaggccgggcgcggtggctcttgcctgtaatcccagcactttgggaggctgaggcgggtagatcacgaggtcaggagatcaagaccatcctgactaacatggtgaaatcctgtctctactaaaaacaaaaaaaattagctgggcgtggtggcacacgcctgtagtcccagctactcaggaggctgaggcaggagaatcgcttgaaccctggaggtggaggttgcagtgagccaagatcgcaccactgcactccagcctgggcgacagagcgagcctccatctcaaaaaaataaagaaaatgtgcataagcatgaagctgtacctgacagattgtgactactcgacgcattttatgtatctgtgtgtgtgtgtgtatatatatgtgtgtacgtatgtgtgtgtatatatatatatacacacacacatacatatgtgtgtgtatttatctctctacctatatatatatcagagacaaggtcttgctctgtcgcccaggctggaatgcaatggcatgatcgtggctcatgacagcctcgacctcaagcaaccctcccacctcagcttcccaagtagcagggattacaggagcatgccaatgcaccaggctaatttttaattttttagtagagacagggtctcactatgttgcccaggctgaattaaactcctaggctcaagcgatcctcccacctcagcctcccaaagtgctgggattataggcgtgagccactgcccagccttcaacacataatattatcattgatagtcaacatctctgggcattttacaatgactcatttaaatatcacagttaccctatgacttagatgctattattaccccattttactgatgaggaaactgaggtttagagaagtttaagtagcaaccagacacagctaggtgatccaataactagaatatgagtccaaatcctaagcttttaaccactgtgcccgctcccatttctcaacaccgtgccccatgcaaagcctcatactagaagagaaactgaggcacagaggttggttctaggactgacagtgcccttggtaaccccaggagaggctggtggagaccttctggatatctctaccctctgtccccttctggggcctcatccctatctggggcagactgggcaggagggagaggctgtgggaatgggggtggggtgggaacaggaggcctcggggaaagggggtgcagggctgcaccaagccagggacaggagggggctgggagtcaagactcgcttcctttgctggattatctcctttcaacagttttattgtaattaccctgaaaatgccgctatatatagagtgagccaaacagcagctgtgcctggggggagggggaataagaggatgggcgggcaggcagcagggaggaggtgggaggaggagacaggaaaggaaagggaatcagacaggaagaagggtaacagcagggggagggcaggagcttcggcagagatctcagaactctggtcttacggagaaccggctggggagaggaaggctgctggggaggggaaggcagtggagggcctgctgggttccaagaccttgggtccagtccccacatggacaatgggccgagtggctcagggagtgcacgaagttccaatgggcttatgggagggctaggtctccacttctttgtacctacacacagttctcaggtcactgcatgtcactcctcaccactgccctgtggttgccaggacaactgggcaaacaccacaccagcagggagccccaagcccagcccaagccccacaaagtctccagccaggaaggggaaggcaggataccactgcctgggaaggcggaagtgagagaggcaggccaacccattcctgtttctcttctacttctttctccaaagaaagccctcactctcctcgctacagcccagggaggtcacgaggggctgggaagactcctgtggcaaagtggcccactccagcccaggcctgagaaaaaaggaccccgaaatccttctggctaccagtatcttctgccttcatgagctggcctctctccagaccaccccccagcattaagaggcgagagagggaaaaaaaaaacaaaaaacaagttttggtttttttttgttttttttttttttggagatggagttttgctcttgtcatccaggctggagtgcagtggcacaatctcggctcactgcaacctctgcctcctgggttcaagcagttttcctgcctcagccccgcaagtagctgggattacaggcacccgccaccacgctcagctaatttttttgtatttttagtagacacaaggtttcaccatgttggccaggctggtctcaaactcttgacctcaggtgatccgctcgcctcggcctcccaaagggctgggattacaggcatgagccactgcccctggccttttttttagatggagtctcactgcaacctccgcctcctgggttcaagcaattctcctgcctcagcctcccaagcagctgggattacaggcgcccaccaccaggcctagctaatttttgtatttttagtagaaacggggtttcaccatgtaggtcaggctggtctcgaactcctgacctcaggtgatccacccgcctcggcctcccaaagtgctgggattacaggcatgagtgaccacacccagccgaacaatttttaaagagaagagagggaggtgggaggtaggaggtggcaaagggtgggctaagagaggcccccacacctgtttagatgggtctggatctctccagagaacctagcactgaatgggtgtcaccaaggcaggagcaaggcctgctggaggccgaggccaaggccatgccacccacatgcctggagtatggcctctggaaccccctgcaggcagggtggggtgggagaaggtaaaagctcagcatgatgtagcagtccccaccagcctcttctcccccaggcatggttgggaacattcctctgtggttttcccgccagccatactgacgactctgtggccacaaggccagagccacatgtgcagaagtggccagatgtggccagagggtggggttacacatactcatcttcattcccaacccatgtcctgccccagcaccaggagaaagggtccttggaaactgcagaaggccttcctggaggtaactagccacagcccacgatggtggcaaggaaatggcagccagctcaggtctccccagcccgtgaagtgctcagcaaggccctgagctggccggagggttatctgttcttagtcaagcttggcttggcccgtggcactctgatcactcagccaagcaatggacagccgtcaacctgctgctcccggcaatgccggggttgtaggagccagattccagcctgcctgcccagggaagggcagaggtccaagcactcctggctcccagcagataaccctgcctagggctggaactgtcgccagcagtactggcttcccttgcaggagccctgcagagagcacatgggctcaggcaaggggaatctcccaccagcctgtcactgccactgcagcagcagagatgttaggcccggagctgcagcgggaaccacagccctattggtatgcaggtggcagggcaggcagagggctctgccatgcagcctcgttcccatgcaaacaggaagcacaggcgactccagaatattaatttgcaggacctgcagggactgggtgacatgcagcaccccaggggtttgccaggtagcaacctgctccacccaaagtggaaggggccatggctactctgcctgagtcagggaaaggaggggcatggagccccatgaatagagtctgcccaggcacagaccctggagcctggcgggccttgcactctctcaaggatctgtgccctctgccagcctggcatgagcagagcaggtggcagcagttgccatcagcaccaagcacctggaaggggaagtggttgtgtcatgataggaagaggctcttggccgcctcctggtggactaggaaggctggggaacctctgggaaaagaagaggatagacaggcccggggcgtggtggccagttacccagggctgtctcttaaaaaaaagggaacctgggccaggcgcagtggctcatgcctgtaatcccagcagtttgggaggctgaggcgggcggatcacctgaggtcaggagttcaagaccagcctggccaacatggcaaaaccccatctctactaaaaaatacaaagattagttgggtgcggtagcgggcacttgtaatcccagctactcaggaggctgaggcagggagagttgtttgaacccaggaggcagaggttgcaatgagcccagatcatgccactgcactctagcctgggtgatagagcgagaccctatctaaaaaaaaaaaaaaaaagagggtagacgaaggggcactgttccctaagaggacaggccaagagctctggctagcaaagagccccactgaaaggccagggagagccaagcgttggtggctataatcccagcattttgggagtccgaggcgggaggatcacttgaggtcaggagttcaagaccagcctggccaacatggaaaaaccccatctttactaaaattacaaaattagccgggtgtggtgatgcatgcctgtaatcccagctactcgggaggctgaggcaggaaaatcacttgaacccgggaggcagaggttgcagtgagccaagatcgcgacattgcactccagcctgggcaacaagagtgaaactctgtctcaaaaagaaaaaaatgaaaagaaaagaaagccagggaaaggttcacaggggaggacaaggacctgggtccttccctcacctgccaggacttcactctgatgggaatcgagaggccagtagagccacctcctgcagaggtcagaggcaaggctctgggggaaagccttgggccccccgcacccagctctatactttcctctttcccagcactgagaaccttccttctcctgggagtggtggcctcagtaacaagcagcagcaccatcctgacctctggttttctgcagggctgaccaccctgcctccatgggaagtcccagcctgggttgctgagtgggtggggctgtgtgtgtttcgttttttctttttttttttttgagacggagtctcgctctgttgcccaggctggagtgcagtggcgcgatctcggctcactgcaagctccgccttccaggttcacgccattctcctgcctcagcctcctgagtagctgggactacaggcacccgccaccacgcccagctaattttttgtatttttagtagagacggggtttcaccgtgttagccagggtggtctcgatctcctgacctcgtgatctgcccacctcagcctcccaaagtgccaggattaccagcgtgagccaccgtgcctggccttggggctgtgtgtttctagccatgcgaggggctggaaaaatagcaagctctggctcaggagctgccctgcccagctcacgagcacaagtggccatgggcagtgcaccacctgagtgacacttctttcccatcccgctgggtctgcctcctcttcaggaaccccatcagcccagtggggacttctgtggtagattcttcaggcagcatgagggagagcctggtcctctgggggagatgatgtaggtgctcgtggggcaacccctgagactactgccagcacagccttagtctaaaaaaacggtgtccaggcaaagagacactgcctccaaatagacgagtggccctgggccatgaggcacaggttttagcagtgccttgggaacaagaattcacaataaaaaacagatctagcttcccaagagcaaggccaagccttccgcctgctctgaacacaccatgagctgcaccccaggtccaagccccctctcagagacaacatctccaactcaagaatccctgtgacaagaaccccggccagcaaggaaatgggaactatagttccccctagagaagccctggggggagggagctggcacagtgtggacctgcctggcagacccaagaggcttagcatctagctctaaaagaccctgctccataaaataaatataaaaataaggccaggcacagtggttcatgcctgtaatcccagcactttgagaggccaaggcgggcagatcacgaggtcaggagtttgagaccagcctggccaacatggtgaaaccccgtctctactaaagatacaaaaaaaaaaaaaaaaaaaaaaattagctgggcatggtggcccacacctgtaatcccagctactcgggcagctgaggcaggagaatcacttgaacccaggaggtggaggttgcagtgagctgagatcgcgccattgcactccagcctgggcaacaacagggagagactccgtctcaaaataaataaataaatacatacatacatacgtaatttttttttcttttttttggagacggagtctcgctctgtcgccaggctggagtgcagtggcgtgatctcggctcactgcaacctccgccttctgggttcaagcgattctcctgcctcagcctcctgaatagctgggactacaggcatgtgccaccacacccacctaattttttgtatttttaggtagagacggggtttcaccatgttggtcaggatgatctcaatctcttgacctcatgatccgcccgcctcagcctcccaaagtgctgggattacaggcgtgagccactgcgcctggcctaaaataaaattaatttttaaaaagaccctgctccagccgggcacagtggctcatgcctgtaatcccagcactttgggaggctgagacaggcagatcacgaggtcaggagatcaagaccaccctggctaacacggtgaaacaccgtctctactaaaaacacaaaaaattagctgggtgtggtggcaggcctgtattctcagctacttgggaggctgaggggctgaggcaggagaatggcatgaacccgggaggtggagcttgcagtgagccaagatcacaccactgcactccagccttggcgacagagcaagactccgtctcaaaaaaaaaaaaaaaaaaaaagaccctgctccaggagccaccagccccagaaagctaggaggaggggaggggacccaaggggcgtagagtacaaggcatgggacattattacgctgtttggaatgtctatacataacataaatgaggtccgtgcagatactccctggatctgaggagctgccttcacaagaggagaaagtgaaagggaccttggaggtcatctgtttcaataccctcaagacacaggtgaggaaaccaagcctcttagagaggctgctctgcagatgatcctaccagctaagtagcagcaaaacagagatctgaacgcaggtgtcctgactcctggcacaggcaggttccctctgaacacacacgtgtgcagtctggctcccatgtgggatgtcctatgtgctcagtgtaagccagccctgggacaggtgagggtctcaaaaacaataaagaggagatgaggtagggggaggggggcagggaaggatgtacaagggctggtgttcaactttattcctgagcccccttctctccttgggctaaaatcccctcagggaggaagatcaccgaccaagtggtcctcagtatttacaaaaaacaaagcctcctctcacaaccccaggaggcccccgaggctagaatggttcctgtgctctaggagcacaaactgtggacgcacactgacaggcccagcacttaaggctgtgtaggtggcatattgcacatgggctctcgtctaaaggggtgagttggggctgacatctagcccaagctccaatcgccaggccatgcacactggcatgaggacgtatctacccagaagaagggccacctttttaaaatctgcacaaaagaagcttttatgtggattagcaacgttcctacccagagacctgagttcaaattccagctctcacttactctatgaccttgggcaggttccctttttctttttttctgacagagtctcgctctgttgctaggctggagtagtgcagtggtgcaatcttggctcactgcaacctccacctcccggcttcaagtgattctcctgcctcagcctcctgagtagctgggactgcaggcatgtgccaccacacccagctaatttttgtatttttagtagagacggagtttcaccatgttggccaggctggtctccaactcttgacctcgtgatccgcctgcctcggcctcccaaagtgttgggattacaggcatgagccatatgcccggccaggttctctcttttttttttttttttggagacagtctctctgttgcccagctggagtgcggtggggtggggtgatctcgggtcactgcaacctccgcctcctgggttcaagcgattctcctgcctcagcctcccaagtagctgggactacaggcacatgccaccacacctggctaatcatttgtattcttagtagagacagggtttcaccgtgttagccaggatggtctctatcccccgacctcagctgatccacccgcctcgcctcccaaagtgttgggattacaggcttgagctaccgcccccggcccaggttccctttatttaagagacagccctaggtaactggcctaccctagagggcagaatctcccaccagcacccaggccctcaggacctccctcaccaggtgggggagacagcagcttctaattaccttgttctgtctcttggagattggggaaaagctcttgttcctgtcctggcctgagggagtttggaaggaggcggagaacaacatttcacaccctgagcccatgacgctgtgacaccgatgacccctccccaccaaggacagtttcccatgatctatttctgtgctcttgtgtgactagtgaggccaatttaggctcaacaggttctaccacaattcagatactatttccacataggcaagctgggtctgactctcacctagcaattttcacaattccttaagtaacacaagtgaacacacatcacgtagtggttgagagcaagggctctggagtgagaggacgctggggttcaattcaggctctccccttcctagggcaagacacagggcaccaccctgcgctccatgcaggcatctgtaaactggcaggcagaacagcacccaacacccagggtagttaggctcgggagaatgtacgcggaggagcttggcacagggcctgggaagatcaagaggtgcgaggcagggctattattaatggctcctcatattttttgtgtcctgaactcttttggcaatctagtgaagcctgtggaccacttctcagaatggttttttcttttttttttttttgagacgtagtttcgctcttgttgcccaggctggagtgcaatggcacgatctcggctcactgcaatccctgcctcccaagttcaagcgattctcctgcctcagcctcccaagtagctgggattacaggcatacgccaccatgcccggctaattttgtatttttagtagagatggggtttcaccatgttggccaggctggtttcgaagccctgacctcaggtgatccgcctgcctcggcctcccaaagtgctggaattatacgcgtgagccaccatgcctggccttctcaggatgtttctgaagtgcataaaatcggctgggtgcagtggctcacacctgtaatcccagcactttgggaccccgaggtgggcagatcacttgaggtcaggatttcaagaccagcctggccaacgtggtgaaaccccgtctctactaaaaatacaaaaattacccaggcatggtctcacatactcgggagactgaggcaggagaatcgcttgaacccagaggcggaggttgcagtgagctgagattgcactactgcactccagcctgggcaacagagcgagactctgtctcaaaaaaaaattaaaaaaataaataaaaaataaagtgcataaaatgaaatacttaagaattcccaaatcttttaagtggggccaacttcacagaccacctggattctaagggtgccagcctcagaatcccaccagagggaagtcttagcactcatttcagactgtctgaatgtcactctgcggtcctggcacaaacaaagcccttcttgtgggtcccacacaacacaaacccgtgcagccagcggctgggtgtcgatgccagaggaggaatctctgagagcagcttccttcccactcccgcacttccaggccatctcacctgcctcgctacctccaggaagggccactctgtgctcttggctcaggccacaattgtgggatcccttttgtccctcaaaaacattacttagcacagataagcacaagttttgggccttgctctcggggcccccagctgcaagcagtccaaaattcttccctgggctccaacctcactgagccccactgcaggtgacacctctctccccagttctattccacatcctcccgggctgaggacataggaggccctaagcccctcttcccacaaagcagacacaatgtgaaactgacctcagagacccttagagtgtcagggaaggaaaggcctgaagaccagcaactcaattccccctgttttcagagggaggaaagtgaggccagagaaggaagagacttgtccaaggtcacctggaaaggagatggaggacccagggcttaatcccagctcttctggctctctgtcttctccccactaaaaaacagaaggggaaacattaaggcccggtctcaaactgaatgagagatgcaacaaggggccaaactctgtattaaggatccagaggtctagacaagggcacctggttggtccccagaacatctgagcccaggggtgcaggggagaatgggatcaagtgcagggaacccccagaaaccttgaggcagactgtgactctgaaggaccttaagctcgggatgcagagccctgatggaaggcataaaacatctctcactggtgcaaatagagttagtagtcgatcctgggatgctctctggagaaatagactcacatttcccagtccagccatttctagcatatacctgggtacaaagctacaggcaagtaaaaggcacactaaccattcaaagtctgcagctattgctaggactgtttgctccacacctggggtggaatggcaggggctccagagcagatctgcctccactccctaagcacagcacagccctgggtgtccagcagggcaccctgcccacctggctgcttgccataatcccccattccactggggtttagacacctgctccctggcggctggaaacatcctctctcctgactgacaggcggctgggagttggattcacctctttctagggcgacagcctccctcctcctgtataggcccttctcccaggagtcccaagacccactaaggccttccagggatgctgatgacatctactggctgactgctgggccctgtgacccatgtccacacagctcttactccaaggatgggctcagtctactcgcatcagaatcacctgagacatgagtttaaatcactggttcctgggctgccctacagaatccaaacctttgttgggggggcagggtgtcaaggcctgagaatctgcattttaatacgctcccttggttaattctgatgcgaccaaaagtttgagaaccactgcctcacagcgtccccaggctgcctcctgccaacctgacagctgttacagctgtgtgcatggacacagttaatctgatttcctgtctggcagctgtgtggcagggaagggacagctgagggtctcaaaaacaagaagaggggatgaggcagggggagggggacacaggaggttgtatgggggctggtgttcaactttattcctgagcccctcctctccttgggctaaaatcccctcagggagaaagatcacagaccaagtggtcctcagtatttacagaaaacaaagcctcctctcacaaccccaggaggcccccaaggctagaatggttcctgtgctctaggagcacaaactgtggacgcgcactgacaggcccagcacttaaggctgtgtaggtggcatattgcacatgggctctcgtctaaaggggtgagttggggctgacatctagcccaagctccaatcgccaggccatgcacactggcatgaggacgtatctacccagaagagggccaccttttaaaaatctgcacaaaagaagcttttttttttttttgaggcaaagtcttgctcttgttgcccaggctggagtgcaatggcgcaatctcgactcaccgcaacctctgcctcccaggttcaagcgattctcctgcctcagcctcccaagtagctaggattacaggcatgcaccacgtcggctaattttttgtatttttagtagagacggggtttctccatgttggtcaggctggtctcaaactcccaacctcccaaagtgctgggattccaggtgtgagccaccgagcccggccaaaagtagcttttatgtggattagcaatggtcctacccagacacctgagttcaaattccagctctcacttactctgtgaccttgggcaggttccctttttttaagagatagggtcttgttatagcgcccaggctggaatgcagtgatcatggctcattgcagcctcaaactcctgggctcaagcaatcctcctgcctcagcctcctgagtagctagaactacaggtgcatgctactgtgcctgattaatttttttttttacatttttttgtagagacagggtctggctatgctgcgcaggctggtctcaaactcctggcctgaagtgatcttcctccctcaggcttccaaagtgctgggattacaggtatgagctaccatgtccagtaagttccttaacctctctgagccttctcaattatacaccacagctatcaacactgtcctaaaacagatatggcaagggccgggcgtggtggctcacgcctgcaatcccaacactgtggggaggctgaggcaggcggatcacgaggtcaggagttcgagaccagcttggccaacatagtgaaaacccatctctactaaaaatacaaaaattagccaggcacggtggcgtgtgcctgtagtcccagctactcgggaggctgaggcaggagaatcgcttgaacccaggaggtggaggctgtggtgacccaagatcgtgccactgtactccagcctgggcaaaagagggagactccgtatcaaaaaaaaaaaaaaaaaaaaagggcagggaaagtacctgatagccttgtcactcagtgcattataatagttccactctcacccctgagtcttgcacttcttaccctcccggcactacatacctatacacacagccaaacccagaaagactgaagagcacgaacacgaatatccagggaaagccctaagaccaaacctggaccccatggcacttcccagtgtccatagcattccttcctggcacaagcaggattcacaccctccctccatgggaaaagcagactcctcctccatgccatctcataaagtcctgcgtattgtctgggcatcagctccacccagtacaagacaaaggggaatccagggcccacataagggaggcagagaattccccacctctgtgtccttgagaatcccatactagagttcaaactcccaggctccccaagccagaactaagctgggatgatggtggtgcccactgtgcactggggagctgtggtagggtggccaggcagagaccccatccatcaaggaagacctctgatcgctaagagcagatgctgagatccgccccactctttaagcaagaacagcagactgcccctgtccttcggtaggctaaggctctgtcttacccgctggggtgactcactaaagctgtctctattcacccagaggtccaggccccagaatagagcccaggaatcctgccagcaattctggactccagccctccccatgcgacattcattcatccatgtgccaggcactgtgctaggtgctgggcaatggcaacaaccaagacagcccagagagcaaaggctatccctaaaatagggttctaaagatgctgctggaggtggcaggcaggcaccaccctcgaaagacccttgccccaaccccttgggcttgggagacctgcgcaactcacaccatccaaagaagcttccctggacacctgctttttcagccataggatcttgcatcctgtctggagaccgatcaagagatggggagagggggtggggagggaaacaccaggctgcctgggccctcatggccgtgtttatccggggtggattttttttaacccaaaggttaaagtgtttctatttgaaacatctatttacattccagagtccaaaaaaaaaacaaaaaaaaaacaaaaaaaaaacaaggctgccgagctccaggcctatatctgtccctagccgcgtcacagacacagcatcagagctgcgcagggggaacattcttagccctctccccgagccgctgaggtgactcacgcctccctcctgccagcatggaccaagccaccactctgaaggccagccagcgttgggggtggagtggggagacagggatctggacagaggggctgcctgggagtccatgcaggggcagccaggcttagggaggagatgagagagcagggtcccagcctgcaaggtttctggggtacaatctggaagcaggtgaatgaacaagctgaggaggaaacttccggccaactgctggctgctgctggtagcaaggaacagaggcgacagggcaggatgggtggacctgataagccagatggcgtggagctgtcccaagcagatgctctgggattattctgccttccaagagaccaccttgagtcccagaggctgtgggctaggggccagcaggcagggtctttagctggacctgtggactccagaccaggataagaaccagccctctgggtttattcctcatcccagggacctgtgtagggggcccccaggcatacgcccctacctcaggggactacgtgggtatcttgtagagccggttcccaaggttacacccccatccccaccccagcctacagggctggccccagggtaatgcccctatcctcggggcctgcatggataccctgcagggctagtcttcagggtcatgctcctacatgagaaaactgcatgggcatccctgcctgggcagatgataagccatgttccaaagattttttgaatcttcccaaaacattcatgctctgacacatccaagtcccactgcaaccttatccctgggcagctcagagccaaatcacaggcacctgcagaggcacacagttcccactttccaatttgaagcttgggatgcacacccacatatccagaggcaaggactccccattcacacgcacacacacagacacccacacttgagtgccaagccactgccaggaggggctgagcaggcatgggtccagcaggcccctccctggaggaagcatcttgtggtgccggcctggtggggaggctgtgccaggaaggcttgatgctgccaacaggttcctgggagtgagggaaggagcggcccagctctgggggaccccacccctagccaagagccaaaaaagttcctgctgagaaggtggcaggattagggggtcccgaagcccatctgagccagagtaacacctcttcatcctcatgagatgggaatcaacccagacctggggagaggagcgccatcgggagacagctaggggctaaggcagccaagcccctcaatatccaagctgccagcctctgcctaactccatcatgactgcaccaagcctccccaagtgtctgattctcaagagactcctggctggggacttgcggaagtcactgtactcgatcctgtagccccaagaaccaagccagaggagctggagtaacctttattcttgtggacacccagctacaccttcttcccttgcccaaacttggggagcgggcagcatggaggcgggtcactgacccacttcctcccctctgaccacagtgccaactaggccaggatcctccagtaacccccagcccccagcagtggatgccgaccctgccagagactgaagggactggaagagatgcagcagagtacagcggaggggcaccggggagcagcaggctctgggcagggagggcaggggcctctctgagcagggatcccccagccctgtgtattctcaacaaaactctcaagacagatctatgcaggaccctatctgtgcaaggctcagggccagatgctcagcccagggacaaggatgccagatgacagagggcaggcagggacatcaaggcacttacctgtcacagggatgctgtgcagagaagtccgcggcaggatttccaaggatggttcccgacctgacatcccatctgctgagaaacaggattctgtctcatagatggtctgcagcatctccacgagcccctgagccttgggcaccagcagcatgccagggagggggccgccagaggcggggagcagaccgaagggaaggtggtcgggcagcccgcacagcacaggttccctcaggccactgccgacgggacccacactgtagggaagtgcctcatccggcctgggcactcctggcggcaggaggggcagggaggccctagagctgcaggcccagctctgctctagaggggcatccgaccaccagcctctccctggttcctgggagctggggtatggctgagcacttgggacaggaaggggagctcagcgggcaggcgggctctgtgttccctcccaaccctgggtgacagctctgggcccggctccctgctcctccttcccgaatgagccgccgccggcagctggcaggagactgaaatagcagttgggggagggccctgtctataaataggtggagcatgctcagggagctgcgggcgggctgccaggaggccccatggggggggaggcggttctaccccaggaggaagcgccaggcgagggggatgggaacaggggagggcctgcactcagggccaaggccacagcgctgggtggccagaggctgggctggggaagggcgccggccagggtacccatgcatctgggagcggctctggctgctactcttggcaagcaagccaggggatggagaccaagaagccagactcaagcctccgtctttcttcttgccttccagaacaggtaaaggaattggaagggtctaggagaggctggcacacaggcaccttccctggagttctaatagccccatggaggtttgcttaacttctgccctcccacagagttgagaggtgcctccccaccccttcaaccagcagagagacccctaaacacctgctaaatggcagctccctcccgctcattctggagtgtcgcctccagaggctgctcagcctcagcttctttctagggtgtagggatactcctcctgggcagacaggtgtcccctggtcccctttcctcaccccaatccaggaaaagggaccagggaacatctgctaattctcagagcacaggtagctcctccatggcaatgtgccaggtgcagtgctacgaacatcatatacatcatctcattaattctgcgtggtgaccttgggagaggcacagatgggaaaactgaggcacagggagatgaagtcactcaccctaggtcataaagctgcttacatggcagggctgggatgtctgaggctcaagtctgagctctaaccaccacactccactgcctcccatttcccagggtttctattaacaggtacaatgacccctgtgctcaagtaggaagagacttgaggttggaacctcgctaaggagagtcaagagtttttcagcatccagccattacccaccagccagcctcaggcctggcagcacagcccctgctccctgggtcctggggctggtgcaccatgaggaccagtggcactcccccgccctccccaccgctggcctgcccctgctcctcaggttgtgcctcccactggtacaaagatcccacttggccccctgacctcactagagccttttaatagcctggttattcctgtgtctatatccccctcccccttcctgatgtcacagttgctattttggagccccctccttgacccccactccaggcatggagccagggacacctgtcctctctctggactggatgacctcaccctcttgttgggagcccaggagaagctggccaaccaaggacacagtggctgtggctcctggagcccaatttcccagccagcttctgccagtcagggatggcaaaggggtctcctgccctcaggctgggagtgggaggattagggggaccacacctataggcagaggcaggctttcccaggcccttgactagcaagatgtatatgttgccagggggtacccagtggtggaccagcaaagaaacaggggtctggagctgcagcttctaaaccagggcagattctagaaaaagggcagtggaacagtactccctcagaggcctagtgctggtggacattcagggtatggctggggatcttgttcaccaccccttgccccaacctcatcctggccaaccaggccctctcaagaggaagggaagggaaggtctccatcagtggggtgatgggcagcagattcaagggagcccagaaagccaagagcagcaacccctcccagcccaggactcctcccacccacgctaggagtaaccagaagggctggctagccctgtcccagctctctctgcctgccccaggcataggagagtgtggcaggagagccttattctaaagaagaggaaggcgtcagttaccaggactcaaaagcagggcccccagaacctggagcacccagacattgaaggaaacaggacttcctgcttagggaagatagtagcacccaggacagggacacccagaggtggctggagccgggagctggggagccagctcccagcaccattacagcctccaacaagtaggaagcaaagtatcagacacagtcagaaaatcctcagtgcaattcccagaaccctccaaggcaataagagaggagatctgggatggggacaaatgtctttttttcttctgagattcaggtgatacaaggtcctcctaatgtctaacttcaatccttcatgctttagcccccctccttgcaattcacttctcttttccgttctctcccaaccagcacacccatgtatcatcccacaaaccttatggagcacccaccaagcatggggtacatgagcttcacccagagccaggactgtcttccccagactcactctgcccctccctcaaaggctgcactctgacctcctagccctctgaatctgaaggaggaaaagagcctaaccctggctccaggttccatttcctgagcccaaaggctgtggggatggggggaccttgaccaaagggaagaaagcaaggtctgcttagtgtgcagtgaaaaagccaatggctggcccaggagcaccctggatgaagtgtgagatgccagcttccctgagacccagatatcagacctgcccaccctcctgttctttcctgcccttcgagcccagtcatgctggagcccatcagcatggcctgggagctgccatgtgccagccaggccccatgctaggtgttggctgaaccctctcatttgaagccaagtccaggaaaaatgtgaacacctactttggcatcttctacttcccctcagggttgaccctgccttctctggccattccattctaagccttcaatctctttggaatgatagagcagggaagaggaggggagaagcaggtcccgctctgcagtgagcacagaggtgtgccagggggcatctcagtagagaagggaggccaggagtctacttctcagaccccagccccatgccaggattgacccactttctcactgcctgccttccctgggggctctgaaggaggcagagcccaaggctggaaggcaggacaccgaggttcctggctccaccccacacccatgccccagtttctctggtcacccagagagcaggcgtggggggggggggctgctgccctccatcctggaaaagggaaagagagaaagtgtgaaggttctgggaggcgctgggcaggcaggtgttgtcatgaagcttgtctccctcccacactggggagaaggatcctggccgcctcctccatggccccgctgccacccagactggcttgcacagtgggcctcactcttgcctgctcttctgggcaatggcacaaagagggtacaaccagagctggcctgggtcccaggcccctgggcagctcctccaacctggttgggccgagtctgagctgagggaaagttctgtcagcctttcagccccactgaggagaacatgcagaagcaaacagttccagaaaaataaagacagccttaatcctcaaacccccttttgccggaagaaaaggcagagatcagggaatggtctcagggaagcaggcaaccccatcaatagcctccgcctgtgattccaagactgcaaaagaggtaaataaagtcaaaggctggtaggcagcccgagccagagggaagtcatcagctcccaccttcctgggcagtgggccccagaaggaaatcactcacagtctccacctgctgcccctcaccaaaacagtctctcttgctaacatgttcactgtgaggaccagggatggcccatctcatattttcttctgtcttccacaggctgagcctgttggtgatactcagtgaggacttgccaaactgaaaagctcctacgctgagaggacttgaggggaaccagaagctctgccccttacaaagcctactgtcctttactctggggaaagaggagcaagtgttcagggaagtgaggaaaaggtgggaggcgctcaggggctgcagcagaccctggggactaaccatttccttccttcccacctcttatctcctgccccatggcccatacctttccttcttggggctctctacagggaagtggacacccgcgtgctctggcttcaatcggtggtctcactttacttccgccgagttccaaggcatgtggtttccaggcttctgccaggcgctgggcaccccagccctagcccagatgccagcccaagctctgggaatagcagacgctaggcccctcagaaaggaagagctggggggaggctgactatctccctggcccagggcagctggaaccccacaactgggaaagccagtccagaaccccaggaacactctgcaggaagggcctcaagcaaacatccccaagcagtggccccagttccaaagcctctcaacaatcctaaaatgaggttcccaatccctggccccctccttttttccttctttccccaacacagagaagacagcatctccccctgctggggggagctggaaagccaggcaggacgcggggcccattccacaggcccactcaggacgcccctcctggccagggctcagcagtggctctcaagctgccagcctcctgcgttggtggacacgtccagctcctccaacactcttgtcagctcccacagaggtagctgcaagggaaacttggaccgccagcatctggaaaggtaacccaataacttcatctatcctgggttgattatcacatttccctgcaagggaaagaaaccccaaagctgggaaaaatcctttccaagccaccaacagatgccgctaggcagcttcaattcccttggccaagagttagaccccagccccatgggaagcagggactgcagatggctcctggacaggtcagcgtcacaactcagaggaaagaagtagctggcactactgcccgacatggctgagcttgctggggtagtgtccagccaagatgcacgagggacagatgaggacccaggcctctcctttcccttcgccatccagcctcagaggggcaagcaagagggcagagctgggcagcccacctgtcccagcccctaggggctgaatgagggcaagggcagagggaggaatatctgaaggagaacagcaaaccctacagaaaggatgatggggaagaaaatgtggggtggtctggattcctccctgatgctgcttctgtacaatcctgcaaatgggtattcatcctaggccccaattgccctatctctaaaaggagaaatatccacctacccctacataaaaaagatgaggagtacgatgggccgtggagagctaaagttgagcaagatggacctttaacactgtgtggaaggagacacccgaggaggaggagacgacagccactactctgaccacactgccccaggaccctcctgggaaactgctgagggtccagctcaggccactagaacacagcctcacaggcatacatccagacccagctgcacatcaagctgcctagagtcccccaaatagactatttctggcagcactggacagggtcctaggaacaaagaggaacaggaaatctcagagtaaaagaccccagattagcaatctaccatatgaagggcccaagaggaagagaggcagtctacctggactcagaggagagccgagactcctctacacacgtcaccccactcccacccaatgccacgcacctgcacacggaggttaaggcccagtgcccttgtaaacctccactaagaaaaaagtatggaacacaaacattccactaagtaaagaagccaccatcacgaaaaggaagctgagcattctgctatagtaaagaaattcctccaacatcatcccagactgcccagagagattaagggatacacactgccccctcaggcccacctgtcttggctagcaggggaaggcgaagctggagctgaacacccctaagttgagagggcaagcatggggggcagagtaggacccattgccttcccaggaccagaccggaccatcgatccctcgattcccaggtctacctcatgggccctttcttgcaacacttctccactccttaccccctcattcccttatagctcagacagtaaaggtcagctggcctggaagggaaacccacacagcccattgcatccgaagctaccccagggtgctcttctccaacctcccagctcttacccgactcgttgggagagttcatgccggctctgggcctgcaggaagctggcgttgggggctgggacgggagggggtggagctgcggtgatgtcaagagagacagacgataacagacagacggacgggacgggagcccggggccgccgtgcctctaatgcccatccgaggccatccttcggggcgaggcagtcaggcactcagaacggcatccctggggagagatggagcagggttagaggcccctaactcaggaatctgagagtcgaaggagaccttggagctcatcagtttgtacctggggatgagggatgagagggagggatacctgcccacagccacaggagaaatctgcagaactggatagaccctggtttcttatcttactaactgatgaggctcccagagcccaagggataggaaatggctatggtggccaaacccaacagaccccttttcaggtgagtgtctactgccagctggggagaccctatagactcccaacagtgcctgccatgggactaggtgtgcaccaaaggagaaagtgcaggggggcttctgatctgtatccatagcagtggggagatgcagggctgatctagagtccctggcagaagtgaagggagaaactggtatcccagcctccatagcctaagctgggacttctaggggtcttctcccgactttctgatccttgtgccacccagctctggaaatatggatgtgcttctgttttggtctcccacagttcaacaacagaccaggacaagagcttctctttccaggaattgagaaagtcagagacctctccatcccaaatctagtacccttggcctggcaggtgcagggcccaagcccagcactttgtgtatattgtacaggttgtgctctgtgtaaggaggtctggcccagggagatacgaaatccagcctgtgccctgcctgccaagccatggcctgacatgctgagtccacccaaaacaagggacgattttttcccagtttgtacgaaagcaacaaaaggcccagcagtagccctgctgaggccagtatagtaaaggaggaggtattacaggaccacggctttgccaacccatgcccactcctccagttctcccccacagttagtcctcaagcctcagacactatgcatacagacacctggcccatccctaaacggcccacgatccaccccagacatgatctcattcatttgcttccaaatgaaggcaggccctccaatacccaatgaaagcaaggtagcaggaagccatcagaggaggctgtgagctgctgcgagtttaagccctaactctgctccccaagcctcgaaccagcaatcagctctgcccccctagacagccccacctcctggcaggattaattctcagtaagccttacattctcatcagattcccaagggtggggtccatttggagcccagaagcccagaagccagctatggcagaaacacaagaacatgaacacacatgcgcatgcacgcacacatgcacacacgagaccctgaggtcccaggcttgctgctgggaccacagggcttggactctatggctggagaaaggtgcactcagattggggggcagagttgaaggggctaaattgctcctgacgggcacaggtatgggattaagacaaaaaaggctgcgcaggcagggctgaggccaagctcaggaatgtggcaggtagggctgctggtgctctggcagggcccacgtgggcaggcagttcagcctgtgcccacaccaaggctggcacccagtcctgctcacaccctttcccgtgggctggggaacacaggttcagaaatgcccacgattcccagcagcctgagtagcccagtccatctccacagtgagaggcacctccacagcaaggtgctcagaaggggcacagccccagtggcacagaaaccaggttaaggttagcccctagcccccatcatcctaacccacctactctctctgtgggtcttaaagatgctgatcctcacccctgaggcagaagaggaagggagcagctccttgaactcatggtgggctcgggactcatctacgtctactcctccccgtcctataaaattcagcaggatccctgggcccctgggccctgtccacctgtaaagagtgtctgccaacacccccatcaagtctcccaagtgaaccagagccacaggctgagcctccctgagaaacaaagcagtgttcatggtctgatcgggacaagcacagattcctgtctggggtgggacatgaaggggagaaggggagcctgatgtttaaaacctgagctgtttgttcccacatctgccagagaaatctgttgggtctcagtgggaagtcagggacaccaggagctgtgtcccagatgacctaacacttggatgccaaaccagggagtggcccaacttccaggacatcataagcagacagacccctgcccaccccactacctcacaccaactctttcttccagacagacccctaccccactccgggatccaaaaccacctcccacatccagccaagacagccggacaaggatgaaggaaacaggctacatctcaccctacaagctcagggctgagcctatggaagtagggtggaaaccccaaactctggcaaagggtgggtggaggagggcagacaagtgaggggcacatggtacaaagcaatgctccaaaggccataggttcacaatgttaccctgtagagatcttgttcctcaaacaactccctcaaaattcctggggagtcaggtgtcccttgaagaccctctctggatcctggagtccagtaccaccatgcaaccccctcccaacacacctgctctggccccaggccagggtaccccctaggtcataggtgacagggtcaagcagtgtgaatcaagtcttgggagtctgagattgtttcactctaccccgacagtttcatcaaaaattacaaaccggccaggcgcggcggctcacgcctgtaatcccaggactttgcgaggccaaggcaggcggatcacctgaggtcaggagttccagaccagcctgatcaacatggagaaaccctttctctactaaaaaaatacaaaattggccaggtgtggtggcgcatgcctgtaatcacagctactcgggaggctgaggcaggagaatcactcgaaccctggagacagaggtgcggtgagccaagattgtgtcatcgcactcccgcctgggcaataagagtgaatctccatctcaaaaaaaaaaaaaaagttacaagccaagacatcccacccaaaggtcaaaggcactaggaatttatcttgacccctcctgaccatggccacagcctaccactttcctcagcctctgagagcttctgttgcctagtgcctcccccaagctaggccaacagaagcccagaaggatcagagccatgaagggtggctgacttggatgtccaggccccaaaccagggaaagggggagggtgacagggaaggaaaaaaggcaccaggctgacaaattcatttttgcaatcggcccatttctgtttgtctgctcagacgcagctccaggcatctgcacaagccagatggaggaggctgctatttctagaaaaaaaaaaaaaaaaaaaaagagaggggggtggtgagaggggaggaagggaggaggcggaggcagagggcagaagacggggtctgtttgccctaaaacctcaggcagaatgataccctcttcccagcactaccaggcagggtccccattcaagaaagggctgcggctgggcctggggtgaggtgggatagggaagaagaaaggcagagaaagtttaattagctaaagtcggctacaataggccccctcacgggctacatcaggttttcattcatgagcaagctacagtgctccaaaaatgccaagaaccacccccccttgctgtctcccccttcccccccctactgccaccaacaggagtgcgtcctctagcaggctggctgagcctaatgctgtgttccagacatccctcctcaaagggatgtgagtaggaagaattaattattaaagagcagctggtacttcagcaccgactgcactacccccagctcctatagctgatgccccctcccccactatgcgggaacacaaatgacccccgcccaacattcccaggccccatttctaaacacacaattaagatgccacccctacggaaggcaaagcaaacctttgtctctgcagctacttggggtgggtggggcatgtgaaactgctgcccccctccaaattacatgatccagccaaagtaggaggatatattggaaaagaaggggaggctggcacagaactaacatttcctccatccttgcccccaagtaacccacacttgagatctgtctctctggtctctggcatgcccacattcccaggacagagtggagatactgggggcccatttctctaactcagagagacccctactgctttgtcaagaaagcccagatccaagttcaagtgaagagagggcaaagagaggagtcaagaaaagaggaaggagacaaaccaagatctccccaagctttgtgtttagggagggagaggaaggagggaagactggaatgaagaagcaggcagcccccaacatggctcatccaccatccagcccagccagcctagcccagcccagcccagcccagcatctcaacagccagcataggctcagggtgcctaggactggggagactgaagaccatgcctgcctgcctacatcctctgaaactaagaggaagccaaaggcaggacccagacccagactgcaatcctgcaaggcaatctggctaggggtccctctgaccaagactcctggatctcaccctcccccccacctccttttgttcccataatctggctccatcctcccctcccagttggacactgaaaccaatcaccaccacctccccaagctccaaatctaatcccagatcccaaaagcatggtggtcactgactgagtgatgggtcccttttgcaccctcctaaaagcaactgcagctgttacctttcctctttagggacacacctcatttcagaaggggtatcagccaggggtatcaagtggtcatctcctctcccaaaggaagcacccaacctccccacttcaacagcccccaccaagctcccagattaattacttacacccagccagttctcatcttccccagggccccagggaagggtggggtggagaagctgactccccccaagttaataaggcactggtagtgcccccgcttccatgagatacagatccaggatgaaaaatggggggcatccacccaagacaagaaggggttgggggggagctccatttcatctcctagctctcgcatcctggctccaaggtgtcagacaggagaagagggtggcaacaaacgcagtaacgcctcacaggagacggggtgagaataatgggagagagaagtaaggtggactccgcagtccccctcctcatgcacggaagtcaaggacataaaatcaaggatgcgttcgtagctatggggagaagcgctctgggtggacagcacccctcacctcagagtaccaagaaaggggtgtccagcgaagaggggtctgcacagaatccgggtgcagggctcaaatggctctgcaacgcaacatgcgccgccagggaaggggcaaatcagacaaccccggccggtctccgagccatttgggggcgcagggcgcgagaaggcgggcccctcccttacctgtagggaaggcgcccctgtctgggaggggcagggaggggcgcgcgcagcaaccccgatgtcccgctcacgggctgccgatgctcccggggggcgccggctggctcccagggccgggaggaaggaaggggggcgcggagcgcggcgcgcgcgctgggagcccgcggacagagacagcaggaggagggggcgccgcctcgcgtcccggggtccggggaagatgggatctgggccggggcggcgcgctcacccgctgcggctcgagctccggcttcgcgggcggcggcggcagcagcggcggcggcagcggcggcagcacctcctcgacggctcctccatctttgcggcggctcctccggctccgctcgccgccgccaccaacaacaacattcggagacgtcactcccgtcacgtgacccgacccggagctaaaaatagacccagaccccccccccagccccccccgccttccccttgcccgcagccaccaccaacccctcccctgcctctcggccctccccgccgggcggggccagcgacgccatcgtgacagctccttaaagggccagtgcccagcacagggttcggccgagacggggtggaagggaagggatcggaacccagcgagcaggagtggaaggatcgctgcaggggccgagtatggatgctggggctcaacctttggattgtaaaagtttcctccttgcgctccccggactttcttttcaaaacgtggatggtgcaatcgtcgcttgcctaagctgctcccctaacacgccctcccgcggtcggggaggggacctggggatagattcccaggggctgggagggccaccgcagcctctgcagcggggcctggctgcgggtggatggttcggacaagtctcgaactcgccagctctgaccgcacacactgcatccgtgccagggaaagaaaagcctgggaaaggccagggtatggctgtaacactccaaggccttcaaaagggcagaccagcagaccaggagccggaaagacttccctgactttggtgccatccacgctacatctcctcttggtacacagtatgaacatgtttaattagacctagacaatttgtcaatgacccagcaattccactaacaaaaatgtattccaaataaataaacgttgttatgttaaaaaatgaacatgagattgtttgtaatgatgtgaaaagttgaaaacaacctaaatatccatcgatagggaattggcaagcaaagcaggagacattcattcagtaaaatattatccagacattaaaagttttataggggaccgggcatggtggctcacgcctgtaatccccgcactttgggaggcggaggcaggcggataacctgaggtcaagagtttgagaccagcctggccattatggtaaaaccccgtctctactaaaaatacaaaaaaattagccgggcgtggtggcaggcgcctgtaatcccacctactcaggaggctgaggcagtagaatcccttgaacctgagaggcggaggttgcagtgagccaagatcgtgccattgcactccagcctgggcaacaagagtgaaactctgcctcaaaaaaaaaagttttaaaggggccaggtgcattggctcttgcctgtcatcaatcctagcactttggaggccgaggcgggaggattgcttgagcccagttcaagaccagcctgggtaacatggcgagacactgtctgtattttaaaaaagaggccgggcgtgggccgggcatggtggctcacgcccgtaatcccagcactttgggaggtcgaggctggtggatcacgaggtcaggatgtcgagaccaccctggctaacacagtgaaacccgtctctactaaaaatacaaaaaattagccgggcgtggtggtgggcgcctgtagtcccagctacttgggaggctgaggcaggagaatggagtgaacccgggaggcggaggttgcagtgagcagagatcgcgccactgcactccagcttggggaacaaagcgagactccgtctcaaaaaaacaaaaaacaaaaacaaaagaagaagaagaggccaggcgcggtggctcacgcctgtaatcccagcactttgggagggcgaggcgggctgatcacaaggtcaggagatcgagaccatccaggctaacacggcgaaaccctctctactaaaaatacaaaaaaaaattagccgggtgtagtggcgggcgcctgtagtcccagctactcgggaggctgaggcaggagaatggcgtgaaccctggaggcagaggttgcagtgagccgagatcacgccactgcactccagcctgggcaacagtgtgagactccgtctcaaaaaaaataaaaaaatagccgggcgcagtggctcatgcctgtaatcccagcactttgggaggccgaggcgggcggatcacgaggtctggagttcgagacgagcctgaccaaaatggtgaaaccccgtctttactaaaaattcaaaaattaggcgggcgtggtggtgcacttctgtaatcccagcttctcaggaggctgagacgaaacaatcacttgaaaccgagaggcggaggttgcagcgagccgagatcgggctattgcactccagcctgggcgggtgacagagcgagattccgtctcaaaaaaaaaaataaaaataggctgggcgcggtggctcacgcctgtaatcccagcactttgggaggtcgaggtgggcggatcacaaggtcaggagatcgagaccatcctggctaacatggtgaaaccccgtctctactaaaaatacaaaaaaaattagccgggcgtggtggcggacccctgtagtcccagctactcgggaggctgaggcaggagaatggcgtgaacctgggaggcagaggttgcagtgagctgcgatagcaccactgcactccagcctgggcgacagagccagactccgtctcaaaaaataaataaataaataaaaaataaaaaagaagaaaaaaaattttataggtctataccgacctgaaaagatgcccgtgatatattgttttcttgaaaatcaggactcaaacaagtattactgaattgttccattattataaaaacaacaaactagattcatatgcctgagtatatgtgtatatcaaaaagcctggccaagggccagacctgtgctcacgctggggggctgaggtgagaggatagcttgagccggagaggtgagctaactaagaacacaccactgcacccagcctgggtgacaaagtgagatcctgtctcaaaaaaaaaaaaagcctaaccagacatggtggaatggtggcacacacctgtagtcctacctacttgggaggctgaaaagggaggattcattgacctcaggagttcaagcccagcctgggctacatatggagaccccatctctaaaaaaaaaaaaaaaaaggaggactgggcgcggtggctcatgcctgtaatcccaacactttgggaggccgaggcgggcggatcacaaggtcaggagatcgagaccaccctggctaatagggtgaaaccccatctgtactaaaaatacaaaaaattagctgggcgtggtggcacatgccttgtagtcccagctactcgggaggctgaggcaggagaatcgcttgaacccaggaggtggaggttgcagtgagctgagatcacaccactgcactccagcctggtgacagagagagactcagtctaaaaaaaaaaaaaaagaaaactgaaacaaaaaaagcctagaagaataaataccagaatgtttgtctttactttgtcttacttatttatttattttgagacagagtcattgtatctcccaggctacagtgcagtggcacagtcatagctcactataaccttgaactcctgggctcaagtgatcctcccaactcagcctaccaagtagctagcactacaggtgcgtgccactacatccagctaattttttttttttttttgcagggtctcgccatgtcaccaaggctggagtgcagtggcgccatcacagctcactgcagcctcgatttcccaggctccagcgatcgtcctgcctcagcctccaagtagctgggaccataggtgcatgtcaccacactcagctaatttttgtattttttgtagagatggggtttccctgtgttgcccaggctagtcttttttttttttttttttttttttgagacgcagtctcattctgtcacacaggctggagtgcagtggcatgaccgcggctcactgcaacttctgcctccagggttcaagcgattctcctgcctcagcctccagagtagctgggattacaggtgcaggccaacacgcccggctaatttctgtattttcagtagagacagggtttcaccatgttgctcagtttggtctcaaactcctgacctcgtgatccacctgcctcagcctcccaaagtgctgggattacaggcatgagccactgtgctcggccgctaaggctagtctttttttttttttttttttttttttttgagacagagttgctctgtcgcttaggctggagtgcagtggtgtaatcgcagctcactgcaagctccacctcccgggttcatgccattctcctgcctcagtctcccgagtagctgggactacaggcgcccgcccccacacccggctaattttttttgtatttttagtagagacggggtttcaccatcttagccaggatggtcttgatctcctgaccccatgatctgcccacctcagcctcccaaagtgctgggattacaggcgtgagccaccgcacccagcctttttttttttttttttgtctcgctctattccccaggctggagtgcagtggtgcgatctcggctcattgcaacctctgcctcccgggttcaagcaattctcctgcctcagcctcccgagtagctgggactacaggagcgtgccaccacacccagctaatttttgtatttctttggtagagacggggtttcaccatgttggccaggatggtctcgatctcttgacctcatgatccacccgcctcggcctcccaaagtgctgggattacaggcatgagccactgtgcccggcctaggctagtcttatactcctgggctcaagtgatccgcccatctcagcctctcaaaatgctgggattacaggagtgagccaccactcctggccacttcaggggattttactgcagctggtcctttcctcatatttgggggaaaaaaaaaaaaagaaacacccaaagtttctacgtaatctgatccctgcccatgtcatctctctttgcttagctttctgtactcccgccatgtgactttctctcaaacaatgtgctctctgctcttcagggcctttgcacaggccgtttttatctttctagaatgcctccctcccttcttctctttgcctggctaactcctgctcattcatcagagctcttttttttttttttttttcttttttgagccagggttttgctcttgttgcccaggatggagtacaatgccgtgatcgcggctcacctccgtctcccgggtttagcaattctcctgcctcagcctcccaagtagctaggattacaggcatctgccaccatgcccggctaattttgtgtttttagtagagatgaggtttttccatgttggtcaggctggtctcaaactcccaacctcaggttatccgcctgcctcagcctcccaaagtgctgatattacaggcatgagccaccgcacccggccattagagctcatttaaatatcactgaaagaggtctttcttggtcctttcattagaatagatccccttgttatatatgctttcatcaaccctgctaataatgtgtaaatatatatctatttatggcattatggttcattgtccatcttgtcctctaaattacaaacttctttattattattattattttttttttgagacagtcttgctctgtcacccaggctggagtgcagtggcgcaatctcggctcactgcaacctctacataccaggtttaagtgatccttgtgcctccaccaccagaatagctgggattacaggcatgtaccaccacgcccagctaatttttgtatttttagtaaagactgggtttcaccatgttggccaggctggtcttgaactcctgacttcaggtgatccacccacctcagcttcccaaagtgctgggattacaggcgtgagccaccgcgcctggccggcatcacctatttgttattgcacttgcacagtctttcgccatcttctggcagttaggatgagttgggttgggagtttgctttcacaaggcttgtgctttgtctccccaaacggattatgagccacttgagaaaagagataaaatcatatgtctttttgcctttctagcacctagcatatcaccttgcacatagtaggtgctcactaaaagtttggggacactggaagattccagaatcttctctcttgggatctcagaacatgggaaaagaatctccccctgtaatatgacaaatgatggtcaataactgcctcgtggagcacattggcttggcacttcccattttacagatgaggaagcggaggctcagggaagcttaataattgcttgcccaaagtctggatcacctgaggtcaggagttagagaccagcctggccaacatggcaaaaccccatctctactaaaaaaaaaaaaaaaaaaattagccgggcatggtggcacacacctgtagtcccagctatttgaggaggctgaggcaggagaattgcttgaacctggaaggcagaggttgcagtgagctgagatcacaccactgcatccagcctgggcaacagacggagactctgtctaaaaataataaataaataaataaataaataaataaataaataattgtccaaagttacagagtttctacaagcaagaactggggttcaaacccaggtttcagtggctgggcgcggtggctcacacctgtaatcccagcactttgggaggccgaggcaggcagatcacgaggtcaggagatggagaccatcctggctaacatggtgaaaccccgtctctactaaaaatacaaaaaaaatagccgggcgtggtggcaggcgcctgtagtcctagctactcgggaggctgaggtaggagaatggcatgaacccgggaggcagagctttcagtgagccgagatcacgccactgctctccagcttgggcgacagagcgagactcatctcacaaaaaaaaaaaaaaaaagcccaggtttctgtgttccctaacacaaggaacaggggctgatgaagctggactcccaaccccagagctttagccttcttctctggaggtctctgagattatcgtgtccatatcccagtggccgaatgtcccagaagttacaaaaatgtaccatatggggccctgataagtcttcagatttcgtcttctcaggtaagtgggggctaaataattcagcatgcatttgtcatgtttctggagtacctgtgagagatgctgaggatatagagatgattctgcctttagggagtctcaagttccttacagaaaacataattgtcttttgttgtgagttcctagggtagacagatatccttgccaggaccattcaccatggaaacaggggtcacgagactgtctccttcaccaccacctcagtttctcaatgtagagtgagcctgcagatgggatctagaagctggctggagagcttctgaccctgggaaccagtggtgaatttggcctcttggtagaaggaaataaatctcagagaaaagccagatatttaaccgatagcctgagagatggcagcatgattggactttggaaggcagcaaggagaggaatgaatgtgttcagcaatgctgctaggccatccgggagttgccagtcctatctggaatcatgaaaaaagtcgtaggccaagtgcagtggctcacacctgtaatcccagcactttgggagtccaagggaggtgatcactagaggccaggagtttgagaccagcctggccaacatggtgaaacctcgtctctactaaaaaatacaaaaattggctgagcatggtggctcacacctgtaatcccagcactttgggaggccgaggcaggctgatcacctgaggtcaggagttcgagaccagcctgtccaacgtggtgaaaccccatctctaataaaattacaaaaattggctgggcatggcagtgcacacctgtaatcccagccactcgggaggctgaggcaggagaatcgcttgaacccaggaggcagaggttgctgtgagtagagatcgcgccattccattccagcctaggtgacaagagcgaaactctgtcaaaaaaaaaacaaaacaacaacaacaacaacaacaaaacacacacacacaaaaaaaaaacccaaaaattatgccgggcgcagtggctcacgcctgtaatcctagcactgtgggaggccgaggtgggtggattacttgaggtcaggagttcaagacgagcctggccaacagggtgaaaccccatctctactaaaaatataaaaattagctggatgtggggccgggtgcggtggctcacgcctgtggtcccagcactttgggaggccaaggtaggctgatcacgaggtcaggagatcgagaccatcctggctaatatggtgaaacatcgtctctaaaaaaaaataataataataattagctgggtgtggtgatgggcacctgtaaccccagctacttgggaggctgaggcaggagaatcgcttgaacccgggaggcagaggttgcagtgagccaagatcacaccactgcactccggcctgggcaacagagtgagactcagtctcaaaaaaatagataaataaataaataaaatacaaaaattagctgggagtgatggttcaggcctgtggtctcagctactcgggaatctgaggtgggaggattgcttgagcccaagaggtggaggttgcagtgggccaagatcaggacactgcactccaactttggcaacagagtgagaccttgtctcaataaaaaaagaaagaaagaaaagttatgaggccagcacaatgctaggtactgtggggaaggcaaaaaataaaaacaaacaaaaacaacaggacaggaggtaacaaaatctgggtcttagggatagagacaactctgggctggagtgctgttggatgagtcatttgcccatagggccttggtcttatctggaaaataggacttgaacttctgttctctgaggtccctttcagttctgacacttcatgagtcctaaattagatatgatggcagatatgacaatgtccagcatggaactgggtggcaaagtttaagctggaccttcattcctccaagatagtcaaggtccagtcctgcccttgggctgtttacaatgagctctgaagacagaagagagttaatttcctgacaaataagccatgtgccctaggcacaaagtaaaggcaatgtcattgaggatgacttatgcagagtgcaatgaaaactgaaaactgcccctaggatgcctgggtttggcccaggtctccctgtgtgaccctgggcaagtcccttctctctgggcccatgtttctttttctttttcttttctttcttttttttttttttgagatggagtctcgctcttgttgtccaggctggagtgcaatggtgtgacctcagctcactgcaacctctgcctcctgggtttaagcaattctcctgcctcagcctcccgagtagctgggattacaggcacctgccaccacacctggctaagtttttgtatttttagtagagatggggtttcaccatgtcagccaggttgatcttgaactcctgacatcaggtgatccacccacctcagcctcccaaagtgctgggattataggcatgagccaccacgcctggcttctgggcccctgtttctttatgattagagggttggactgaatttccttccttccagctggagacttttctgggtggtgcaacaaggtgaagttgagaaggaagggtggaacaacaacttcttctcctttccctccttcccctgactcctctgggcttgagggagaagaaaccagtttcaggccagcatccactgtgcagtcttgcctgactgtttgagatgtttagggggagagcaacaggcagggaccttggctaagtcaccacctatctgagcctcagtttccctgtctgtaaaagggcatggttggatagatgacatctgaggatttttccagctctggcagctaactctagaattggatctcaaaacaaacaaacaaacaaacaaacaaacaaacaaaggaggacctggctagaggcgagagcctcagtcattcctcacctgagagccctacctaacccttgacaccttctgtcccttttcaggcctcccacctcctgccttcctggcctagagatcaggagcaggccactgtctctacactcagcaatggccaaccctgaggaaagccagcagaaacatggctcctagaacaagctgtgaatttgtttaaaaataaagactattctgggtgcagctgccaccgtttgtcatggcgcctaaagaaataaatgattttttatatatgtagagagagcagagcaaagctgtcagtctgctggtctgtagatcccatatccaccaagagctgccatcagtagccagccactgctagaggacagcagatgaccaggaggcctggcacacagttgggactccaggacaggcttctcagcccagctccctccaggttcctagagtgtcccacaagccttcttacccctcccagcagcaaaaatagcagaagtccaaggagatggctgagaaggaagcctatcctctcccctacctccctgctgggatgtggagctgaggcccaggatttcctggactctacagagttcctgcctgcctgctcaagagtcaaggccacatggccacaacagtgcaagtggcagtggtggtcgatcatgtcccacatgtctgcaggtcattccagagtgtcctctctgggcagggcgtgcccagagaatgtcgggaggggatagtgggagcccatgtacctgccctcggggagctttccatcctgtggaagcaacatggccacatgaagcagggtggagcagagtaggagagagggggcctggaaatttaggcaaatcacttgccctctctgagcctcagtttcccttctgtgattagagaggtggaccctgtgattctggaagaccttctgagccataaggtcatgaaacgatagtgaacaatacacagtgaacttacaggctatgtggaaaggtatggactactggcaccccaaaactcacccaaatgccttccctccagcctgcagttttgggttaacgtacattttgcacatcttttattgtaatcatttattgaacgacttcttttcaaaagactgtcacatatattatcattgtcataacaactctgcaaggtagatattatgtactccattgtatgggtaaggagacggaggctcagggagcttacagtcaataagtgacaggacccagactctctgggtgcatagccacatggggtctcccccaaacaggcagagacagcctgaggacccagaacaccctggcaggaagtcctgcattgatggcgtatggaaggcacatttcatcatcctccaacagcaggatttctggcccatccatgatgacacacttctgcccagcagacacagaagcagatataatcctccccaaaactcctcagggtggacattattattattattattattggttttgttgttgttaagacagggtttcctgttgcccaggctggagtgcagaggtgtgatcacagctcactgtagccttgaccttctgggctcaagtgatctccctgcctcagcctcctgaatagctggaactacaggcacatgcttccctgcctggctacattttatacttttttttttttttttttgcgacagagtcttactctgctgcccaggctagagtgcaatggcacgatcttggctcactgcaacctccgcctcaagggttcaagcaattctcctgcctcagcctcccaagaagctggaattacaggcgtgcgccaccacgcacagctaatttttgtattttcaatagagaccaggttttaccatggtggccaggctggtctcaaacctctgacctcatgtgatctgcccacctcagcctcccaaagtcctgggtttacaggcgtgagccattgtgcctgatgttatacctgatttttacaatttccttattttttgttttacacacttttttttttttgagctggagtctcgctctatcagcccaggctggagtgcaatggcacaatctcggctcactgcaacctctgcctcccgtttttaagtgattctcctgcctcagcctcctgaatagctgggattacaggtgtacaccaccatgcccggctaatttttatatatttagtggagatggggtttcaccatgttggccaggctggtctcgaactcctaacctcaagggatccacctgccttggcctcccagagtgctgggattacaagcatgagccaccgtacccggctgtttttacaaactttttaaaatggaaaaatacagaacacgtcacaaattttcgtgtcattcttgtgcagggtctatggcattcttctgtatatgggtcctattttagtatacgtgctgccgaagcaagcacacagtctgatttttgatgtaatatatcatgaaaatactcccatggcattaaatcttccacaacatcattttatgtggctgcatggtattccattgtattgttttattgtagtttctttactttttttttttttttttgagacggagtctcgctctgtcacccaggctggagtgcagtggcgtgatctcggctcactgcaagctctgcctcccgggttcacgccattctcccgccccagcctcccaagtagctgggactacaggcgcccgccaccacgcccgggtaattttttgtatttttagtagagacggggtttcactgtgttagccaggatggtctcgatctcctgacctcatgatccacccgccttggcctcccaaagtgctgtgattacaggcgtgcaccaccacgcccagccgtagtttctttacttgatgctcttttgacggatgcgtcagttgtttccaattttttttttttttttttttttttgagatggagtcttgctctgtctcccaggctggagtgcagtggcgtgatctcggctcaccgcaagctccgactcccgggttcacgtcattctcctgcctcagcctctggagtagctgggactacaggcgcccactaccacgcccggctaattttttatatttttagtagagacggggtttcactgtgttagccaggatggtctcgatctcctgaccttgtgatccgcctgcctcggcctcccaaagtgctaggattacaggcgtgagccaccgtgcccggcccaatttttccattttaaataatgctgtgggctaggtgcagtggctcacacctgtaatcccagcacttcgggaggccgaggcaggcagatctcctgaggtcaggagtttgagaccagcctgaccaacatggagagaaaccccggtctctccaaaaaaaaaaaaaaaaaaaaaaaaaaaattagccaggcgtggtggcacacacctgtaatcccagttactcgggaggctgaggcaggagaattgcttgaatccaggaggcggaggttgtggtgagctgatatcaagccattgcactccagcctgggcaacaagagcgaaactctggaaagaaagaaagaaaaggaaggaaggaaggaaggaaggaaggaaggaaggaaggaaggaaggaaggaaggaaggaaggaagggcgggcaagcaaattgtgatgcacattctctttcttttttttttggatggtgtcttgctctgttgcccaggctggagtgcagtgactccatcttggctcactgcaacctctgcctcctgggttcaagcaattctcctgcctcagcctcccaagtagctgggattacaggtgtgcaccaccacgcctggctaatttttgtatttttagtagagatggggtttcaccatgttggccaggctggtcttaaactcccaaagtgctgagattacaggcgtgagccaccgcgcccggcccatgtgatgcacattcttataggtaaatcttggcatgcgtcaatgactgtattattttctcaggatgagttctcagaagtggagctgctttgtcaaagggtgtacataacttcaaggcttttgagggtattttctgatccagtgaaggacaccactacccagttgtccaagtcagaagcatcaggtaatgttaagtccaagagaataaggctaattaatgaaagaatgggccacacaacccattctctaccagggggtatgcagaggagagaagttaccaggctctgaagattgtcagccactggggagatactatgagggtctttcctggaaaccagaggaatacttttgccccctgcctacctggtcctccccggaagccacaagtgctccacatagcatccctgggcaactcctttcctgctgcccaagcaagcaaggtgccagttccgcaggatccagccagctgcaactgaccctgagccaactcccacagccctgagtgggtcagctttgcttatgaagcaggaccctggcacctccccagggggtccagcttcccttcccccagcccccagccttgagggagaagcaattgggataggcttggggaggtgggtgtcggatcaggggtgtaaaggatagaggagctgaatgtctctgtcctcagggagatcttgagatgactcacatgccactggaggggagagagaagctgagggatgaatggattgcaaactagagggaggggccgagcttccgtgccttgattcgcccgcgtcagttgcttcaacaacatctgcagtgcgtggggttgagcgatcccactggtggggctggggtgggtagggcttccaggctggctgacgtttgcttcccgcccgctgggccagcctggagcagttcatgaatgactcacctcattgtcaggctgattcactgctcggctgggtacttgggtaggggggcggccccctaggtacggctcacacccacacacatgcgcacatacacatgtacgcacacgcccaggtggggctccactggggtcggacacgagggatgggatttctgtggtaagaggcaggggcatgcacaccatctagtgtgtgaataaccttgaagtttcagtctgtggtgtactagtgtttattcacatttaaattaattaaaattaaacacaattaaaacttcagtttcttagctgcagtagccacatttcaagtgcttaatagacacacatggtcagtggctactctgttgggcagtgtgaatagaaaacatttccatcaacacagaaagttctatcggacagctctggtttacatagctgcctacacaccaactcagaatccacaaccttcgcacacaaagctacacaaacagatcagtcctccccgcccccataggcagcaaacaacacacatttaattccatacacgtattcaacgggcaatacccaatcacctacacaagattctcagcgtgtacacacacttcctatccaaatatgccaccgtccataccaaggcaaatgtaaagataaacacataaaaaaaagtatgtcatcacactgactcgaatacaactgtttgttcgataaaaatacaaattaggggccagccgcggtggctcatgcctgtaatcccagcattttaggagaccaaggcaggcagatcacctgaggttgagaggttgagatcagccttgctaacaatggtgaaaccccgtttctactaaatatacaaaattagttgggtgtggtggcccacacctgtaatcccagctacttgggaggctgaggcaggagaatcacttgaatccgggaggtggaggttgcagtgagctgggatcccaccactgcactccagcgtgggcgacagagtgagactccgtctccaaaaaaacaacaacaaaaaaaacaaattagggtgaaatgcatttgcaagtatactgaaatagatacaaacccaagccatgtggttcccataacaattcccagcacgtgtttgcaaattcaagtaagggggaagggaatccacatttgttgaggtcctgttaataggccaggcatggcgttagccatttcaatgcattaattcatttaatctcacaacaaccttgtgaggaagatgtattattcttttttttttttgagacggagtcttgctctgtctcccaggctggagtgcggtggcgcgatctcggctcactgcaagctccgcctcccgggttcaagcgattctcctgcctcagcctcccaagtagctgggactacaggcgcctgccaccacgcctggctaattttttgtatttttagtagagacagggtttcactgtgttagccaggatggtctcgatctcctgacctcgtggtccgcctgccttggtcccccaaagtgctgggattacaggcgtgagccaccgcgcccggctggaagatgtattattctttattttttaattttttttttgcgacagaatctcactttgttgcccaggctggaatgcagtggcatgatcccagctcactgcaacctccgcctcccaggtttaagccattctcctgcctcagtcccctgagtagctgggattacaggcgcccgccaccatgcccggctaatttcttttttttttttttttagacggagtcttgctttgttgcccaggctggagtgcagtggcgtgatctcggctcactgcaagctccgccttccgggttcatgccattctcctgcctcagcttcccaagtagctgggactacaggcgcccgccaccacacccggctaatttttttgtatttttagtagagacggggtttcaccatgttagccaggatggtctcgatctcctgcccttgtgatccgcccgcctctgcctcccaaagtgctgagattacaggcaagagccaccgcggaagtgagcattgagttgcccagccattcgcactccctcctgacaaatggcatcaagtcattcaacaaacacttgttcagcctgggcaacatagggagccttcatctctacaacaaataaacataaaaaaattagctgggcttaggccaggcacagtggctcacgtttataatcccagcacttcgggaggccaatgcgggtggatcacgaggtcaggtgttcaagaccagcctgggcaacatagtgaaaccctgtctctactaaaaatacaaaaagttagctgggcgtggctgggcgcagtggttcacgtctgtaatcccagcactttgggaggcagaggcgggcagattacctgaggtcaggagttcgagaccatcctggccaacatggtgaaaccctgtctctactaaaaatacaaaaaattagctgggcgtggctgggcgcagtggctcacgtctgtaatcccagcactttgggaggcagaggcgggcagattacctgaggtcaggagttcgagaccagcctggccaacatggtgaaaccctgtctctactaaaaatacaaaaattagccaggcatgatggcacatgcctgttatcccagctactcgggaggctgaggcaggagaattgcttgagcctaggaggaagaggttgcagtgagccgagatcatgccactgcactgcagcctgtcctgcagagcgagactgtctcaaaaaaaaaaaaaaaaaaaaaaaattagccgggcgtggtggcgggcacttgtaatcccagctacttggtaggctgaagcaggagaatcgcttgaacctgagaggcagaggttgcagtgagccaagatcgtgccactgcactccagcctgggcaacaatgtgagactccgtgtcaaaaaaaaaaaaagttaactgggtttggtggtgtgtgcctgtgatcccagctactcaggaggctgaggtgggaggactgcttgggcccaagaggtggaggatgcagtgagccatgactgtgccgctgcactccgggctgggtaagggagtaaagtaagtctcaaaacaaaaacaaactcattttctgagtgtcttcaatgtgccacatgctggttcacaaaggtgaaaagccacagtcttgctctgaagcagtattaagtcaagcagggaggccgggcgccatggcttacgcctgtaatcccagctacttcgaaggctgaggcaggagaatcgcttgaacccgggaggcggaggttgcagtgagccgagatcgcgccactgcactccagcctgggcgacagagcgagattcggtttaaaaaagaaaaaaaaaaaagaacggaaaagaaaggggcgggggcaggattaggcatcgtggggccaagatgcttgatctcacctgaaccagtgctgaaccagccgactgggaagaggagccgcttgggggcgaccgagagcccatccgtttcccctttaagaccagagcggaagactacagtgagaaggccctttgtgtcggcgggaaagaaatatgcctgcccctttaagaaggcggagacgccccagtggcggcgtcttcgaatgcggcctaaggcgcctgccgccagtctcctggcgactttccctatatcgcagagactcatccctctgaccccagcccggaagcactgtccctcggagtccgagacttccacctgggtcgtgtccaaggccccggcgactccccggactcggggtgccgggccaacctccccgccgaggcccacccgccgtcgctatggtaatgccgcgcccagcttgggggctggcgggccgcagggccccctggcctccggaactgctcatggggttccagcccctcgcccgcgcaagttgcaggaccggggtctgggtgggggttcggcggagtcgggagacctgggctgtcgtcagggcttgtcatggacgcgccggagaccctgagaaagcattctcctcccccgggcctcagtttccctcctgttgccttcctaccctcctgggaaacccccctttccagtgcgctcagacgtcactaccgcttgggtccatccctttcccctccccgccccacactttctactttttttttttttttttttggacgaagtctcgttctgtcgcccaggctggagtgcagtggcgtgatctctgctcactgcaaccgtcgtctcccgcccacccctttcactctgacccttagagtcttgggaactgtatcgccagctgtagctcctgcggctctggcatctggggttaggcaccacctctgatctgggtttgacactcatcaggaactggctacagcagccctgctggctagaaagaaggaaccgtggactggggcatcctactctcctgggaccctagtttttgggccttggattaggtagggaaactactggcttcatttgcagaaacaatgccactgtgcagacatgtttggatttatggtagtttctcttatgtttgacataagattggtcaggcgaaacctttgggatattgcaaaatccttaggcccaagccaggggccgtggctgacacctgtttttgtttgtttgtttttttgagacagagtctcactctgtggcccaggctgaagtgcagtggtgcgatctccgctcactgcaacctccacttcccaggttcaagcaattctcctgccttagactcccaacaagctgggattacaggcgggcaccaccaccccagctaacttatttctatttttagtagagacgaggtttcactttgttggccaggctgttcttgaactcctggcctcaggtggtccacccgccttggcgtcacaaagtgctgggattacaggagtgagccaccatgcccagcctgtggctgacacctataatcccagcactttggaggccacagtgggaggatcacttgagcccaggagttcaagactggcctgggcaatgtagtgaggccccgtatctataaaaatttaaaaattagcctgggcgcagtggctcacgcctgtaatcccagcactttgggaggctgaggtgggcagatcacaaggtcaggagttcaagaccagcctggctaacatggtgaaaccctgtctcaactaaaaatacaaaaaaaaatagccaggcattgtggcttggcctgtaatcccagctacttgggaggctaaggcaggagaattgcttgaacctggaaggtggaggttgcagtgagccaaaatcgtgccgctggacttcagcctgggcaacagagcaagactccgtctcaggaagaaaaaaaaaaaaagaaaattagctgagcacggtggtgcacacctgtagtcccagttactcaggaggttgaggtgggagggtcacttgagcctaggagattgaggctgcagtgagctatgatcttgccactgcactccagtctgggcaatagggcaagaccctgtctcaaaacaaaagacaaaaacaaaatgtttacgcccatgtgcacagtcctggagaactgcccttgctcccctaggcagccttccctttgccccctttcttcccttccaggattagtgcagatggttctgagtggattatgttacaagaaagttttttaatctttctttccttttttttttttaagacagagtcttgctctgtcgcccaggctggagttcagtggtgcaatcttggctcactgcaacctctacctcccgggttcaagcaattctcctgccttagccttccaagtagctgagatcacaggcatgctccactaggcccggctaatttttttttttttaaagacagagtcttgccctgtcgcccaggctggtgtgcagtggtgcgatctcggctcactgcaacctctgcctcccagttcaagcgattctcctgcctcagcctcctgagtagctgggattacagatgcccaccaccacgcccagctaattttttgtatttttagtagagacagggtttcaatatgttggccaggctggtctcgaacgcctgaccttgtgatccgcccccacctcaacctcccaaagttctgagattataggtgtgagccaccacgcccgaccaaattttgtattttaagtagagatggggtttcactgtgttggtcaggctggtcttgaactcctgacctcaggtgattcaccagctttggcctcccaaagtgttgggattataggcatgagccaccgtgcctggcagaaagtgttttaatctttttctaagaggcgggtctcactatgttgcccagcctagcctcaaactcctgggctctagggatccacccacctcagcctcccaagtagctgggactgcaggaatgagccactgcacacagctaagtaagttttttagaatacttgggtcttttttttttttttttttgatacagactcactctgtcgcccaggctggagtgcaacctctgcctcctgggttcaagcgattctcctgcctcagcctcccgagtagctgggattacaggcatgagccaccatgcccagctaacttttgtatttttagtagagacaaggtttctccatgttggccaggttggtctcgaactcctgacctcaggagatccacctgcctcggcctcccaaagtgctgggattacaggcatgagtcaccacgcccggccctagattgtttaagtctttaacgaaatcccatttcttctcattccttagtcctttcccagccgtagcaaaaacaaacaaaaaacaatatacctgatggtattgttagtgctgggaagaagcagagtgaggacagaatgtgcttgcaaatggtatttctcaaccccagttggttttttttcttttcaggcgtgcagtttgcagaagctgtttgctgtggaagaggagtttgaagatgaggtagggaagtgttgatgatcagaggtggcagacgaggtcttaaaatgtaaacactcaggttcagaacattttggattagcctgtaccagcctccttttagttgacatgtgtatgtttttgcctgtgaggtgctgagaagtgatgagaagtgtaaacaacctacttaactgtcttagaaacaaaaaaccagagcaatgaattgcctaattgtcatacctttaaattataagggctctttcctggaagctgtgtcatctagctgatttaattcacctctatgataacatacttgcagtgggaagggctgtgtatgtagagccagaaccatgtaagagatagcatagttactggatggcaggaggccaggggtcagcaattggctatgtgaatcagggcaagttactttattctctggtcttctgttttctcttctacaatatgagggatgctcttctgcctcagatgttcttcccttccctctgtctaatcacaagatgaggggtgagactagatccaaagctcgcacgttagaattacccttgtctaggctctaccacacaccaattaaatcagaatttctgggaatggcccagccagggatatttcttttttttccttttcttcaacatttattttaagttcaggggtacacgtgcaggtttgttacataggtaaacatgtgccatggtggtttgctgcacagatcatcccatcacctaggtaataagcccagcatgcattagctattcttcctgatgctctccacctccctgcccccggcagcccccactgtgtgaacttctttctttttttggagacaggatctctttctgtcacccaggctggagtgcaatggcacaatcacggctcactgcaacctcaacctcccaggcataagtgatcctcccacctcagcctcctcagtagctgggcctacaggtgtgtgccaccatgcccagctaatttttcgtttttttgtagagacagggtcttactaagttgcccaggctggtctcaaattcctgggctcaaatgatccttctgcctcggcctcccaaagtgctgggattacaggtgtgagccagtgggcccgtcctgatttttgcttttacaaataattcacaactgccagttttgtcaaggagatgtgtccttgtctttgtctttcagctttggagatatgtgattacaggctgaaaaagtgactgttaaaatgaccctcttgggtcttacaaggtgatgatgggactgctaagtgagtaatggaattagagtaaaggaatctgacagctgaagtttctgttccttgaaaatggcagatcagtcccttcccccttcctaaagcagatgatgtcatgtctgagagtgagctctttgggagaaaaaagaccatcaacctccagagtcatcaggattttattactgctatagttctggttattattattattgttgagtcctgtggttgtcctgcctgagtatgggactcacttaataatacacaaagcaggaaaaagcctttctgtagcccagacaatccagtgcagtagcagagggtgggggtggtggggaccctcctgtcagttaaatcagcagttctgactcaaaaccaccctcagaacaggtctgttgctcttgaaggtgtcaatctcaccttgcttcccaactggaatccatactttatttagcttgcctgaaaagctatatttaacttctgccttttttgctggctccaagtcctctctggcttactgaagggtagctatctctgtgtagtgtgtgtgtgtgtgtgtgtgagagagagagagagaaagagagcacacgagtgtgtattggggatgaggagtgagctaaggacaggcagcatgaccagctggatagatccctgtttagataacaggccagacaccagaaagtggtctccttgagatggttgttgtgtgacctagggtgatttgtctgacttcttggttccctggaacgtttgcttctcctgctgttctcctctaactgcccctctccccacccatgaagactgaagaaagaggttacctgaagacttagccttagattggagtgtttttgatagagccttgtgtagggccatgggtgaggtcagaggtggtaagagacaccactattggctttcatgctttggtttctttttctttttcttttctttcttttttttttttttttttgagacagagtctcactttgtcacccaggctggagtacagtggcaccatctcagctcactgccaacctctgcctctcaggttgaagtgattctcctgcctcagcctcccgagtagctggaactacaggtgtgcacccccatgcccagctaatttttttatttttagtagagacggtttcgccacgttggccaggctggtctcgaactcctgacctcaagtgatcctcctaccttggcctcccaaagtgctgggattacaggcatgagccaccatgcccgaccctcatgctttggtttctttcaagtatctacacacaaacatacacgccatgtgcctgaacagtaaaagcagaggggttcttgatttccagatgccaagacctaccatctctgcttccttgtaggatttcttgtctgctgtggaggatgcagagaaccggtttactggctcactgcctgtgaatgctgggcgcctgagacctgtctcttctaggccacaggagactgtgcaggcacagtcctccaggctgctgctgttacaccccactgctccctcagaggctttgggcctgccagacttggacctctgcctccctgcctccagcacgcccagtgctgacagccgtccatcatgcataggagcagctcccctaaggcctgtctctacttccagcagctggattggcaatcagagaagagtgacagtgacagaagtgctcagagagacagcaagacctcagtcctcagccttacaccccctactcacctttgagagccaacagcagcaagttggtggctttgaggggcctgaacaagacgaatttgataaagtcctggcaagcatggagttggaggagcctggcatggagctggaatgtggagtcagcagtgaggccataccaatcctgcctgcccagcagcgggagggttcagtattggctaaaaaagcccgggtagttgatctgagtggatcttgccagaaggggcctgtgcctgccatccacaaagcgggtatcatgtccgcccaggatgagtctctagatcctgtcatccaatgtaggactccacgaccccccttgagacctggtgctgtgggtcaccttcctgttccaactgccttaacagttcccactcagcaactccactgggaagtctgtccgcaacgctcccctgttcaagcacttcagcctctccaagctgctagagggaccattcagagcagccctcaaaatcgtttcccttgtcagccattccagtctccaagttcctggttaagtggcaaagctcatttacccagacctcgaactcccaactcaagctgttctactccctcaaggactagctctggattatttcctcggatacccttacaaccgcaagctccagtgtcttccattgggtctcctgttggtaccccaaaaggtccccagggagctctgcagacacccatagtcaccaaccacctggtgcagctagtcactgctgccagccggacaccccagcagcccacccatccctccacccgagccaaaactcgccgtttccctggcccagctgggatcctgcctcaccaggtgagtgagctggctttctaggatttggtgggcaagggagagaagcagggttccagcactgtccagccctagcatatcttccctcttgcagagaaggaaggaaggaagtgcagagaggcttttcaaagctgcaggagaaataaaagggaagaactgaatgctagaaaatccactgtgaagaagtgcttaaggctctgaggacatcataattttcttttttcttctccttttttttttttgagatggagtcttgctgcaacatccaggctggagtgcagtggcgcaatctcagctcactgaaacctctgcctcctgggtttaagcgattctcctgcctcagcctcttgagtagctgggactacaggcccccgccaccatgcctggctaatttttgtgtttttggtagagacagagtttcaccatattggccaggctggtctcgaactcctgacctcaagtgatctgcccgcctcggcctcccaaagtgctgggattataggcgtgagccaccacgcctgaccctcttttcctttttttaagaagaccctcttttcctttttttaagaattagagattggctatgttgctcaggctggtcatgaactaggctcaagccattctcccgccttagcctcccatatagctgggactacaggtgtgcactagggcaggaagtcattcttgtgcatttgttaaggtcttatgtgttggacaatttgcttggaactgagaatacagagattaaaagaaacagttcctgtcctaaagaacttacagtgaaatggaagaaacagatgtaaacaaacaaacatgcacaaagcacacagtgtgaacaggggtcattccctgggtgctgggaagacactggctctgccttaggcttgctgagtgggctttggatggatgagtaggaggttaacaggtgtgtggcggagcgggcgctgtgctctgtggatgttctggcagtgggaaagcagggaagagcatgtgtaagggcacagaggcagaagagcaaggtgctctcagatccacagaacagttcattgtggcaggtgtggggaagctggggctgaaaaggagacagccctggtgagacttggattaaactagtcttggatcagatcccagataattggactctgaggatctggactggttgtgataggtgtgccctcttcctcccattttaagggtgtttgaaacaatttctgcctgttacttgctcttccctagcatgttagcagatatccaaagaggccgtctatgttcctcctgggctggatctccctggaggaaagggttaggacttggggaaagctgcccctttgctcatcacaggcctctcaatttttctttctttctttctttttttttttttttaagacagagtcttgctctctcgtccaggcaggagtgcagtggcacaatctcggctcactgcaacctccacctcccagcttcaagtgattctcctgcctcagccttccaagtagctggcattacaggcatgggccaccacgcctggctaatttttgtatttttggtagagatgggggtttctccatgttggccaggctggtctcgaactcctgacctcaggtgatccacccgcctcagcctcccaaagtgctgggattacaggtgtgagccgccacgcccagccaggcctctctatttgggtcactgcccccttcaggcagccctggtttttgcacctgggcgagctccggcttcctcacgttttcaaaccaatccccaaagtatcttttttgagctgccaaagaggctcctgagactttgttaggagagatgtaatatgtgttaatagtccctgatcatttcctgaactcattatgtaaaccagacaataagctgtacttgtaaataacagctgctaagcttgctctcatcttctccttccctcccctcttagcagagtgggagaagtctggaggacatcatggtttccgcgccccaaactccaacccatggtgctctggctaaattccagacagaggtaacttatgcaaatgttaactttctgggtgtgatttgagagtgaggggcgtccctgtgtgtttcaggagttaagaatcaagagctgatgctgctaggcctgtttgctggtgtcacacactaaaaggcatttgaggcaggtagttgggggaggcagcaattttactggcattaagtgaggcctgtcctggtgccaggtaggtattatctgatgccatgggtccagccttctttcccatctaagaaataaaggcccagctagctccagcttcccctgggggaggagactgtgataagtattatgagattgtgtctcaggagcccttcctctcaggtttctgagaactgagctgggaaggatctgccttctcttgcctttgctgggttccctttggtgggtgagaccctgcttcccttctccttggggttctggttgacctgctctgccctcaaacccagttttgcttttaattctccccagtattttttctctgctgtagctccgcagatctgccagtccatttcagatccaaagcagcagatactctctggattcaaagcatgtattaatgtaagaaggttaattgttaaagctagaagcatgccaaatagaatatgactggtttcaaaatggctaagccactctggaagcctataaatatatgtggtggatccctacccctaagactttttgagtctgttacaaaaaataagcgtagatagccttctgcttcaatgcagttaaagtcaggagctgattttattttattttattttattatgttattttatgttattttattttattttattttatttttgagacggattctcgctctgttgcccaggctggagtgcagtgtcgtgatctcggctcactgcaacctccgcctcctgggttcaggctattctcctgcctcagcctcctgagtagctgggactgcaggcgtgtgccaccatgcctggctaatttttgtatttttagtagagacggggtttcaccatgttagccaggatggtctccatcttctgacctcatgatctgcccgccttggcctcccaaagtgctggggtaacaggtgtgagccactgcgcccagtcaatttttgtatttttagtagagacgaggtttcaccatgttggccaggctggtctcgaactcttgtcttcaggtgatccacccgcctcggccttccaaagtgctgggataacaggtgtgagccaccgcgtctggcccaggagctgattttattaaaaatttgtttttcatacctagtcctgcagacaggacctgattttaaaaagaaaaaaaaagagtatctgctgaatgaaacctgtgatacgcgacaagattttcacgtgcttcaaatgccaaagcaatcagaaaaaaaaaaaagaaaaagagaaaaaaaagatgtcacataccattttctggccttggagataaatgagaggagagactgtggccattgtactacagtttttccgaggggatttgcctttcctctctcacccttccaccctgtttcaatcaagagtctgtagcaaggtagacctattcatacaggctccccctctgctctgtggtaccagattgttgctagttcccaggcatctgtggaggaggattttgggcgagggccctggctgaccatgaaatccacgctaggcctggatgagagagaccctagctgcttcctctgtacctacagcattgtcatggtgctgcgcaaggtaaggattctgggtgctgagacccaaaggaaagaccatttttctccctctctctgacctactgccctactccaccttaggaaggggctgtttgctccctcgtaccctatacaagtagcagcacgaagcccctttggttgtatcttccacttacctaccttttcactgtcatccataggattgggcccaggtggaaggagagagtgggttatggtatgcctctgcacttccaggccctgggtggggtggggtgagcacactgccaccctcaaatctccctagtggttaagggttgtgtgcagagacatgccagtacatgtgccaacatatccctgcctgtgactgttatgatggaacattgtgtaaacacatataaacaaaagaaagtgctggacacagtggctcacacctgtaatcccagcattttaggaggctgaggtggaaggatcacaaaggtcaggagttcgagaccagcctgggcaacaaagcgagaccctgtctctacaaaaaaatacaaaaaaaaaaaatcagctggatgtggtggcacatgtcttatagtcccagctactagggaggctgaggccagaggatcacttgatcttaggaggttgaggctacagtgaactatgatcgtgccactgccctccagccggggcaatagagcgagagcttgtctcctttaaaaaaaacccaaggccgggcgtggtggctcacacctataatcttgagaggtcaaggcgggcggatcacctgaggtcgcgagttcaagaccagcctgaccaacctggagaaaccctgtctctactaaaaatacaaaattagccggacgtgttggcacatgcctgtaattctagctactcaggaggctgaggcaggagaattgcttgaacctggaaggcagaagttgcggtgagccaagatgtgccattgcactctagcctgggcaataagagtgaaactccgactcaagaaaaaaacaaaaaccaaacaggtcaggcggggtgggtcacgcctgtaatcccagcactttgggaggctgaggcgggcagatcacttgaggtcaggagttcgagaccagcctggccaacatggtgaaaccccctctattgaaaatacaaaaattagccaggcttggtggcacacgcctgtaagtccagctactcaggaagctgaggctggagcatcgcttgaacccagaggcggaggttgcaatgagccaaggtcgtgccatggtactccagcctgggcgacagagcgagactccatctcaaaaataaaaaaataggccgggtgcggtggctcatgcctgtaatcccagcactttgggaggccgaggtgggtggatcacgaggtcaggagttcaagacaagcctggccaacatggtgaaaccctgtctctactaaaaatacaaaaattagccgggcgtggtggtgggcgcctgtaatcccagctacttgggagcctgaggcaggagaatcgcttgaaaccagaaggtggaggttgcagtgagccaagattgtgccattgcacccagcctgggagcgaaactccctctcaaaaaataaaaaagaacggaggcaggggagagaaatgaaggacctcccagctctaggtctgtcagagagagatggggtacctccttgtcctccacaaagaagatcatcactataactatactctgacccctcctaaccccggttgccctggcacacttggagacctgggaagtcacaagtgggccgtggaaggctcagcatatgcctctccttgtaagcaggcagccctgaagcagcttcctaggaacaaggtccccaacatggcggtgatgatcaagtccctgactcggagcacaatggacgccagtgtggttttcaaggaccccacgggtaaggaattaggtcctaggttgtctggtgagtgggctccattgaggccaggaaatgaggtggaatcaccctctccctttgcagacaggaaaactgaggcagtgagcagcccacttcccagccagggcccataccagtcgctgtgctgcccttgaccccgagactgatgggccatgtggtatttgcaggagagatgcaggggacggtgcacaggttgctgctggagacgtgccagaatgagctgaagcctggctcagtgctgctgctgaagcaggtatggggagcagctctccacaccactgccccccggatagagccctcagtgtctgtctccttacctgtttggctgccttcctctacaacaccaggcacggagtggctgaaccattgctaggccctggcttgagctcagggaaggcctgtggcccttgagctggcccccattcttcagggtggatagggatggagggttgtgttaaggggagattgtggcaaatggttctcttctggcaccaaggctaggcagaggacaccaagtgaaaggcaggtgggagccaggtgtccatctggcagctcccagtgctccatcaggacactgaccttccctttccttgactccagattggagtgttttctccttcacttcgaaatcactacctcaacgtgacacccaacaacctggtccatatttacagcccggattctggggatgggagcttcctcaagccatctcagcccttccccaaggtaagaggagcaggaagaaacgggagactggtaaggccctccttctgcctggatcttctgatttcttcctctcttccaccctggggagcagaggtctgaagggggcaggtgctctgaggtgaaaaggtatctttggggacaggaccatctcctatccctcatccagccgcctggcagatggctcagtaacagtacctagaggagcagctggcttcttggtgatccctgagcatctgatggcaggcttgaacatctgagaggataggagtcacttgagaactaaccaagtggagggcccaccagggggtggtggcagtaaatgaccgagggtcagatctgctacaggtggcagtgtggagaacagtgagctacaaatggcctgtcaggtgagccagcacctgctctgtgtcttccctcttggcatctgcctctgctaaattagggggaagctgcacagagcactggtggggacatcctctttaggaaccgagacgagcatttggcatttatgggaggtaagcatgggcttccaggcagatccactccaggttgagagtgtagagcctgggcttgacttgccctgcccccaccaccttcctaggatcttgtgtactgaaaacgtgtactgtgaccttgggcaagtcctgttgcctcccttgcaacagcttcatctatagtacgtttgacttgatgacctctagtcatcttagacagaggttttcatctaagctccaactttccacttccattttcctcatctttccccttagcccctccacattctctcaaaatcaccccacttctaaaccctttctttttctttcttttcttttcttttttttttgagacagttttgctctgtcacccaggccagagtgcagtggcgtgaccttggctcaatgcaacctctgccttccagattcaagcgattctcccacctcagcctcccgaacagctgggaccatgcccaactaaatctttttgtattttttagtagagacagagttttgccatattggccaggctggtcccgaactcctgacctcaggtgattggcctgccttggcctcccaaagtgctgggattataggcatgagccaccgtgctcggcctatttttcttttaaatttcaaattatctatacttattgaaataaatcaaaatagcacagaataagcaaaaaatgggtcctacccttccccactcctatttcctaggactaaccatggttaaccatttaattaccggtatttatttattttttttttttgaaatggagtctcactctgtcacccaggctgtagtgcagtggcatgttctcagctcactgcaacttcacctcccgggttcaagtgattctcctgcctcagcctcctgagtagctgggattacaggtgtgtgccaccacactcggctactttttgtatttttagtagagacgggatttcaccatgttggtcaggctggtctcgaactcctgaccttgtgatccacctgcctcagcctcccaaagtattgggattacaggcatgaactaggcgtgccaggcccagtttttgtgtttttagtagagatggggtttcaccatattggccaggctagtctcaaactcccgacctcaagtgatcctcctgccttggcctcccaaagtgctgggattacaggtatcagccaccgtgcctggccttaattaccagttttaattacctgcccatatattagctatatattcctttggggattgttaacaactaattttaaatctcaggctaactcttcaatgtatttctgaatggcctcttcactctctgctctagttatagagaatctctaaaatattagataccaacagaactaggaaagcaaatcagccaaaagaggtttgttttttgttttgtttattatctgctgctttgggtgtttggtgtttcagctgcctcccttcagcatgggcctgggtggctggcctctgccatactcttccatcatgtttctttttttttttttttttttttttttggagcaagggtctcactctgtcccccaggctggagtgcagtggcacgatattggctcactgcaacctctgcctcctgggttcaagcgattctcatgcctcagcctcccgagtagctaggattacaggcgtgtgccaccatgcccggctctgtttttgtatttttagtagagatgtggtttcaccgtgttggccaggctggtctcgaactcctgacctcaaatgattcacccgcctcggcctcccaaagggctgggattacaggtgtgagccaccacacctggccccatcatgtttctttcctgagccccacactgttcgtttgaggttgtctgggtagaggtggtgccatctgaagggatttcagggacacaggcattggtaaccagatcctctgtccccaggattcagggagcttccagcatgatgtggctgcaaagcccgaggaaggcttcagaacagcacagaacctagaggcagaggcgtcccctgaggaagaactcccagaagcaggtaaagcagtcagcccatctgggagcaagagaggttctatttcctgttgaatagctgaaccagaatcttcctggctatatcttgttcctctttccatgaatctttggatcttatataatcttacagaaatcagatacagtgtcttgtttggcaaggctgcaggccacaaactcgttaacagtgtgatggggccatgtaaaacaaagtgtcatccacaggtttcccccattttcaggttatgtgccatcagccacaaggaggaaacatcaccatcccctgtccagatggacaggcgctatctttgtgccacactctgagtcctctgtgggctgatgaccagaccacagaggcagatttcccatcctgagtaagcttagaggagtgctgaggagtcaagacgtccactggtttttgggaaaaccaggctacaaaccagagaggcccaaatgcagaccccttgtggttgggccagctgcttcctcagaaggcagcatcacccaggtgaaactaacaccattcaggatctagttttagctttttttactttaatttttatttttgcgacagggtctcattctgttgcccaggctggagtgcagtgttatgaacacgcctcactgcatcctcggcctctaggctcaagcagtcctcccacctcagcctcccgagtagctgggactataggtatgtgccactatgcccagcaatttttttttttttttgagacggagtctcgctctgtcacccagggtgaagtgcagtggtgcgatctcagctcactgcaagctccgcctcccgggttcatgccattctcctgcctcagcctcctgattagctgggactacaggcgcccgccaccatgcccagctaattttttgtgtatttttagtagagacggggtttcactgtgttagccaggatggtctcgatctcctgacctcgcgatctgcccgcctcagcctcccaaagtgctgggattacaggcgtgagccaccgcgcccggccatgcccagcaatttttaaattttttgtagagacagttttgccatgttgcccaggctggcctcgaactcttggggctcaagcgatccttctgtctctgcctcccaaagtactgggattagaggcatgacctaccgtgcccagcctggtctttagcttttcaattccaaaaattcaatcctgtctggccccaaagttcacaggattatatgtgggcagaaacctacccaggtgccgaggcaagagactgaaggcacaaactgttccagtataatacagaaaatagttagaataagaaaagttatactagaaataggatatagagatgattatatatggatattaccaatcattagtttttagtactaatttctgtattattattataactgagaaaaaaaccagccaatatagagtcaagagctgaagggacattgtgagaagtgaccagaagacaagagttgggtgccagatgtagggtccagccctactgggccttgtgggttttctcttcgtatgcagagacgagagattatagaaaaataagacacaagactaagagaaagtaggaaagacagctgggcccaaggggccactaccaccaatgcgtggagtccggtagtggccccaaatgcctggatgcgctgctatttattgtatacaaggcaagggggcagggtaaggagtgtgagtcatctcaaaagattgataaagtcaagcaagtcacgtgtccacgtgatgggggcctttccctttgtggtagctgaagcagagagggaggacagcatatgtcagcgttttttctgtgcacttatcagagaaatcaaagactttaatactttcactaattcactactgctatcttccaagaacttaaaagaagaaccaggtatacaggcggaacatgaaagtggacaaggagcgtgaccactgaagcacagcatcacagggagacgttgaagcctccagatgattgtgggcaggcctggctaatgtcaggcctcccacaagagctggtggagcagtgttctcgaactcccccaaggagagttccctttcccagtctgctaagtaacagttgccttcccaggcactggcgctaccgcaagactgaggtctgctaagtaacgggtgccttaccaggcactggcgctactgctagaccaaggtgtcatcaggcagcccttatcagggcgtgacagaggactttcactcttgtcttctgctcacttctcacaatgtgccttcagctcctgactctgtactggctgttttttttctcggttataatgataatacagagattagtattaaaaactaatgattggtaatattcatatatagctgggcacggtggctcactcctgtaatcccagcactttgggaggccaaggtgggcggatcacgaggtcaggagatcgagaccatcctgactaacatggtgaaaccccgtctctactaaaaatacacaaaaaattagccaggcgtggtggcgggcgcctgtagtccagctactcgggaggctgaggcagaagaatggcatgaacctgggaggcggagcttccagtgagccgagatcgtgccactgcactccagcctgggcgacagagtaagactccatctcaaaaataaaaaaaatccatatataatcatctctatatcctatttctagtataacttttcttattctgttttctttattatactggaacagtttgtgccttcagtctcttgccctggcacctgggtaggtttccacccacaattatggataggtgttctcacactacctaattcacagtataccaatggataaaccacaaaggccattatatcttgtgaaaaagcatatgtctcttatcctggaatcttgcattgcctggaagcctgcactctttctttgtgagacaagccaaggcatcaccagaaggttgctggtagtgacagagagttgattatagaatattagggctggtgggccgggcatggtggctcatgcctctaatcccagcactttgggaggccaaggcaggtggatcacgaggtcaagagatcaagaccatcttggctaacacggtgaaaccccatctctactaaaaatataaaaaattagccaggcgtggtggtgggcgcctgtaagtcccagctactcaggaggctgaggcaggagaatggtgtgaacccaggaggcggagcttgcagtgagccgagatcacgccactgcactccagcctgggcgacagagtgagactctgtctcaaaaaaaaaaaaaaagtttgtttcaggtaaagtggggttgataacaggagctaactggagatgccctacctatgaatgtttattgaggcacagagcaagcactcagtcagtattagctgctgctagtaaataatattgctagggattatcgaggtcagctgtgtccaagttctcggacataagtaccacatctgagaactgtagtcttacacaggcactttgaggaagggggtgatattttccactgtcagatgagaagccaattaaggaactgtgtaactctgaacacatctgatggcttttcccagccctctttctccttcagccaatgagagttgcactaggtgacctctgaagccttcttgtttggcactatgactggatggaaggagaggaatcagtgaggctcaggggaatcctcttcctcgtcagaatggcccagggattacgcccccgccttttgtcatgtacgggtacaaggggagcagagggaagatggaagtcaggccagcctcaggcccattggcatgggtaccactgcctggaggagccgcctgcccagctatacagccaggtccaggccctcctgaagggcagaaactttggacctgagtcacatggaatgctgatgttgtcactaaggctacccatcattcccctctctgtagatgacctggatggactcctgagtgagcttcctgaagacttcttctgtgggaccagtagttgagactgccccaacgcaggacaacccaccatgagcaggcagctctgggcatgtgtctggtcacatccaagggggagaagaaggccagcatgattggagagtggacacagccggggggcttctgtggttgctcccaccctgggtgttttccctgagagccccctcatctctgcgctgccctcactttgggccttcctttgccgttggcaccagaatccggccggagactggctctccagccaacaagaaaggcctgtcaccctcgccttgggtgtccctctcctgcctcagcttaattttagaggatattgggcctggttttcttgtcccttcataccctagtccctggacagctgaggagatgaaaggagccacaccacaacaatggcggcctgcccctccacacaggggagaagcacgctcaggcttcctctgctttgtctcttcagacctgtggttgctctgctcatccatgcccaaggttcccaggtgcaggacagaggtgtggcctattgtaccttgttctgaaataaagcatctcctgcttcttctgcctccctttcttttccaccccctgctgctcctgcctaactgccctgccagtgctgtgtggccacaaaagggctcaggcaactctttttctctttttttttcttttttatatacttttagacttctaaaattttttttttgagacggagtctcgctctgtcacccaggctggagtacagtggcgctatctcggctcactgcaagctccgtctcccgggttcatgcctttcttctgcctcagcctcccaagtagctgggactacaggctcctgccaccacgcccggctgattttttttttttttttttttttttagtagagacggggtttcaccgtgttagccaggatattctcaatctcctgacctcatgatccaccccgcttggcctcccaaagtgctgggattacaggcgtgagccaccatgcccggccttagacttctaaatttatagatttatttattgcaaagatagtacagagagttcccacataccccacacccagtttcccagttaatattattttatttatttatttttgagctggagtctcgctgtcgcccaggctggcgcaatctccgctcactgcaacctccacctcccaggttcaagagattttcctgccggctgggcgcggtggctcacacctgtaatcccagcactttgggaggccgaggtgggcggatcatgaggtcaggagttcgagaccagcctggccaacatggtgaaaccccgtctctattaaaaatacaaaaattagcggggcgtagtggcacgcacctgtaatcccaggtactcaggaggctgaggcaggataattgcttgaacccaggaggcagaggttgcagtgagccgagatcacgccactgtactccagcctgggcgctgggcgacagagcaagactccgtctcaaaaaaaaaaagattctcctgcctcagcctccggaagctggggattacaggcacacgccaccacaccagctcatttttttttttttttgacatgcagtttcactcttgtcgcccaggctgcagtgcaatggtgtgatctcggctcactgcaacctctgcttcctgggttcaagtgattctcctgcctcagcctcccaagtagttggaattacaggcgcctgccaccacgcccagctaatttttgtattttttgtagagacagggtttcaccatgttggccaggcggggcttgaactcctgacctcaggtgatccacccgcctcggcctcccaaaatgccgggattacagacatgagctaccgtgcccagcctaatttttttatttttagtagagacgaggttttaccatgttggccaggctggtctgaaactcctgacttcaggtgatccccccacctcagcctcccaaagtgctgggattacaggcatgagccaccatgcccagcaatttttttgagacagggtctctctctgtcactcaggctggagtgcagtggcccagtcatagctcactgcagcctcgaccttcagggctcaagcaatcctcctgcctcaacctcccaagtagctgggactacaggcagcaccactatggctggctaatttttacatttttcttttctttttttttttttttttttttgagacggagtctcgctctgtcacccaggctgaagtacagtggtgcgatcttggctcactgccagctccacctcccgggttcacgccattctcctgcctcagcctcccgagtagctgggactacaggcgcccaccatcacgcccagctaactttttgtatttttagtagagacggggtttcaccatgttagccaggatggtctcgatctcctgacctcgcgatccgcccgcctcggcctcccaaagtgctgggattacaggagtgagccactatgcccggcctaagtttttaatttttcatagagacaaggtctcactattgttgcccaggctggtctcaaacttacgtgatcctcctaccttagcctcccaaagggctgggattacaggtgtggtctcccctattattaacaccttagtatggtacatttgtcacaatgaatcattattaactaaactccatactttattcagatttactcagtttccccctaatgtccttttcccctcagaatcccatttcacaatcatcctgactcttggatgtgatagtttctcagaccttccctgtttttgatgaccttacagttttggggagtaccgggtaggcatatggtagaatccccctctatcaggatttgtctgatgtttcctcatgattagactgaggttctgggttttggagaggaagaccagaggtcaggtgccattcttgccacatcttatgaagggttcatgctgactttgatcacctgactgaggtaaactttgccagacttctccattgtaaagttactcttttttcttctttctgtactggaccctttggaaggaagtcactgtgtgcagcccacatttaagaattggggaattatgttctacctccttaagggcagaatatctacacaggtttttgttttttttttttctttttgagatggagtctcgctctgttgcccaggctggagtgcagtggcacaatcttggctcactgaaagctctgcctcccgggttcacacaattctcctgcctcagcctcccgagtagctgggactacaggcgcccgccaccatgtccagctaatttttgtatttttagtagagacggggtttcaccttgttagccaggatggtctcggactcctgaccttgtgatccgcccgcctcgacctctcaaagtgctgggattacaggcgtgagccaccgcacccggcagtttatttggaattcttctgcatgggagatttgcctattctcccttatttattcattcatccatttatatcagcatggacttacaggtatttattttatactttgggatatgatctcaaactacttaattttgttgccaagtgtggccaggcgtggtggctcacacctgtagtcccagcactttgggaggccgaggcaggcggatcacgaggtcaggagatcaagaccatcctggctaacacagtgaaaccttgtctctattaaaaatacaaaaaattagccaggcatggtggcgggcgcctgtagtcccagctacttgggaggctgaggcaggagaatggtgtgaaccccggaggcggagcttgcagtgagccgagatcgcgccactgcctccagcctgggtgacagagcgagactccatctcaaaaagtaaaataaaataaaattttgttgccaagcaactcttcattgctgtgacttctctgtaccaattttcggactagaggtggacaagaggcatgggtggggtgtaaaaggtctaattataccaagttgccaaccttgttttcctttctggaaggaggagttgggaaaactctcccaactcatgggcaagaggaggcaggttaaagagcccggtttgggccaggtgtggaggctcatgcctgtaatcccagcactttgggaggccgaggtgggaggatcccttgggcccaggagttcaagcccagcctgagcaaggtggtgagatgctatctcttgaataagtaaataaaataataaatagccctgtttgacagccagcccctcctgccttagcctcagcctgcactaagcagctaggagacagaggccttccatgggcatgggcttggcactcctctggggggaagcgttaatctccttttcccaaagaggctgatcccatggattccagttttgttgttgttgttgtcgtcgttttagagacatggtctcactctgtcaccaaactggagtgcagtgcagtggtgtgatcatggctcactgcagcctcgatctcctaggcttaagcagtcctcccatctcagcctcccaagtaacagactactggtgcgtgccaccacgcctagctaattaacaacatttttctgtagagatggagtcttgctgtgttctccagactggtcttgaactcccgggctcaagtgatccttcccacctcagcctcccaaagtgctgggattacaggtgtgagccacagtgccccactggatcccagtcttaaggctgaagtgagtaagtgctttgagaactccatgttcacttacctgctgattacagcagggccctgttctagaggcttttgtgccacaaggccagggcaagaaggggctaattcccctgcaccctggtcccttcacattcccattgggtttttctacctgaacctaccatacatttccttctctcccaccttccactccctgctaactccccatctacactgggatcttcctgcacctaaacccccacagctgggagtggcagcatgcacctgtagtcccagccacttgggaggctgaggtgagagaatcacttgagcctagaagattgagaccagcctgggcaacatagggagatttcgtctctaaaaaaataaaagctcccctctgccctgggcctattccccattcttgacacccatgagccccggtccccctgctcagtcctgatcaatcccacgctcacatcctggcttcttgtgtgcttcactaccccacaggctctgagatcccagaaggcaggctgggcatctgatcacctggccctgttccctccaggttgaagtcaaggcctcctttctctgccctcaggaagctaactctacagacaaggggactgaatacagtggtatcttgggactaagctgttagggtacctagctccttcaggtctgtgtggcaagaaggcaggggaggggctaggctatgactcttgtgtgcctcagggaggaaggggacacccacctgccttggcctctcttggtctcacccagccttgccagattctcaaccctgggaacccagctgtgggtgcccagccaggccgttgatgtggcaattaacacaccaaatgggtgccaacagggttcatcaaggctgcatttatagaggcatctttctctgaggacctccaggctttgctttgtatgatctaattcctcctctgggatcccccaccctggactgccaccaagaggctggagccaggcagagagtaggtgaacagtagagtaggggcaatgccggaaaaagcccaggctgctgccacccacttgggcgggcgggtggatggatgtttgctctggcagagaacagggaccttcgttcaatgcactacacataagaggcccgcctgccatgagccaagtgctctgactgccagggcctgctctggagcccacatccagcatggcagacccacatcaacagcatagataggtgctttacagcgtgcccctgagtccttcaggagtgcagattgggcagtggctggaactataagagtcaggcaatgggttgctgaagagacctctcagagcaggtgaccttaggggtagatcctcaggaaggtgttgagggaattctgagctaagggaatggcctgacagggaacggttgtggggagccgtgcgtgatgaggatgcctaccctacgtgagtggcatggggccaaaccaaggaattgggggcttagttgaaaagggcaggccaggtgcagtggctcacacctgtaatcccagcaattcaggaggctgacttgggaggactgcttgaggccaggatttggagccctattttaaaaaaatgaaaggacaggtattggaaggcagcagaagtttttaagcaagggaattaaccattttagacagatcattccggcagcggagcagaagggatatggccagaggaagaaacaccaggtgaaagactgagttgatccaggtttaaggcattacatcgaggggctgaacttgagacagtccctgaaaatgtaagaacaggagctagaacttgcttatgggaagggcctagggagaggaagaaataaaagatcactgggcaaggtgctgctgcagggccaggaggcaggacaggcagcgggagaagggccaggaggagccccagatgcagaggggacagaccagccctgcctgcaggccgctgtgcactgagtgagctcagggtgagcagagcttttgagccctccccttccccagcttggcaggcacaccagcttgtgtggtttcacggcttcattcctccccctagaggctcctggaagcacagctgctttctcctaagagtgaacaggtctgtggcttaaacatcttaggtccattcccagagtttccagctcaaccccttggctctcctcaggccggccatgtgagcccccttagcagctgggttaaaaaaataaatcaaggatgattgaaggtgctgggagctgtggctcacgcctgtaataccaacactttggggggccgaggcgggcagatcgcctgaagtcaggagtttcagaccagcctggccaacatggcgaaaccgactactaaaaatacaaaaatcggccgggcgcggtggctcacgcctgtgatcccagcactttgggaggccgaggcgggcggatcacgaggtcaggagatcgaaaccatcctattcttggctaatacggcgaaaccttgtctctactaaaaatacaaaaaattagccaggtgtggtggcaggcgcctgtggtcccagctactcgggaggctgaggcaggagaatggcgtgaacccgggaggcggagcttgcagtgagccgaggtcgcgccactgcactccagcctgggtgacagagcgagactccatctcaaaaaaaaaataataataaataaaaatacaaaaatcagctgggcatggtggcatgcacctataatcccagctactcaggcagctaaggcaggagaatcacttgaaccccaggaaacggaggtttcagtgagccgagatcaccccactgcactccagactgggtgacaccatgagaaaaaaaaaaaaaggatgattgaaggcagtttctacagactagtctgtcctgcttggagaatgggggaggctgccaggtggctgcagcagctgaaggcaaaaagtgtaccatctttttttttttttcttctttttttaagagatggagaggcagggggtggtggctcacgcctataatcctagcactttgggaggccgaggcgggcagaccacgaggtcaggagttcgagaccagcctggccaacatggtgaaaccctaaattaaatctctactaaaaatacaaaatttagctgggcatggtggcgggtgcctataatcccagctactcaggaggctgaggcaagagaatcgtttgagcccgggaggcggaggttgcagtgagccaagatcgtgccattgcactccagcatgggagacagggtgagactctgtctcaaaaaaaaaaaaaaaaaaaaaaaagatataggtctcactgtgttgcccaggattgtctcaaactcctaggctcaagcaatcctcctgtcttggcctcccaaagtgctaggattacaggcatgagccaccattcttggcccaaagcacaccatctatgtggggtcctggctctgcctctcacaaactgtgaccttgagccagtagattactttgttaagccttaaattcctcatctgtaaaacagagataagaccacccatctcaggggcattcaactgtgataatttcatttattgtccaaaccaagtttactaattattgggtgggctgggaagtatgatcccctgggtgaaggtggatatgaatgtgatttaaacaccgtgaaactctgtgcatatgtacagagttattgctgttactgcagatgctgggaagagctgctcaccttctcagtaactctgccttgacctccccttacctcctgtgctgaggtcagccctctctcctccacgtgggccaatggtggctcctgccctccagccaacatcagagaggctggaggcaccttgtcttcctcccagccctgcccatctccatgactgacctttttgcgcaccctggaccttgccaacccaagatgctcgctctagagatgaaggtggatgcagatgctggggttcgggggtggcctcagctgagggcctgctgaccaaccaaagggtatcggcaggggcaggggctggccctcaccctgggctgggggttgggccagcagcttctcagcaccaggatcatgactctgagcaaaccatgtttaccagagcagcaaaggacctatttatagcctcagctgctgctttctctggctcacggtggcgggggcagggtggctcctcagagcaagggaggtagtcgggtcgagggaacctggctctgcccaggtgccactgcccaaacccctgggccccatccatggcaagagagaccttccccttcacctcctccatgctgcgctctctccgcctgcagcaggagtggctggaatgggaggaccggcggcgggcggctgcccagcagtgccggagccgcaggtgcccgtcaagtccccgggcccgactcactaggcctcaccgttcctgccgagacccagctgtccaccaagccctcttctccggcaacctgcagcaggtccaagccctgttccaagatgaagaggccgccaacatgattgtggagactgtgagcaaccagctggcctggtcggctgaacagggtagggggcaccagaagagggcagaagaggagggagaaagaaggggagtgggtggggaagggggagagtctaggcccctccttccctgcagaccacagactatagcagccctttccaccacctatcctagctccctcctaaacagagatgaggcagggttagcagtctgtatgtcttttaagaattaaaagttgaccgggcacagtggctcacgcctgtaatcccagcactttgggaggccaaggcaggcggatcacgaagtcagaagtttgagaccagcctgaccaacatggtaaaaccccatctctactaaaaatagaaaaattagccgggcatggtggtgcgcacctgtaatcccagctactcagcagctgaggcagaagaatcacttaaacccgggaggcggagcttgcagtgagccaagatagcgccactgcattccagcctgggggacagagcgagaccctgcctaaaaaaaaaaaaaaaagagacaaggtctcactatgttgcccaggctcatctcgaactcctgaggtcaagtgatcatcccgccttggcctcccaaagtgctaggattacaggtgtgagccaccaccccaggccccaaggtgaacaagcctttgacactattagccattcaaagacgctgagatttccttaatgggagtcactctacttagttggcccctgtggttttatacagcaattaatttttttatgacacatactatgttttgttacagattgataagctgtattaaaaggctgttccaatttattcttccacttcaggacttgaataagcccccttccacaggtacagcctggcagtgtttgtgctcagcaaaccatgcagagggaaggccagtgtcagctgtcagctggaaccagcatccccactccctgccctgccctgtcttatacaccacctcccaaaactatttgctctccctagggttctgggtgctgacccccaagaccaagcagacggcacccctcgccatcgctacagcccgaggctacacagactgtgctcgacacctgatccggcagggagctgagctggatgcccgtgtcgggggtcgcgctgccttgcatgaggcctgtgcccgagcccagtttgactgtgtgcggctgctgctgaccttcggagccaaggctaatgtgctgactgaggagggcacgactcctttgcacctctgcacgatccccgagtccttgcagtaggtgcctgggggctgagacagtttggggagaaatgtgtgtgtgtgtctccagctcacaaggccagaagagggaacctgacaaccacatgcagctttgtggttcataaagcaccgcatatacacatcttcacaataacctggagacacctcatcctacagatgagaaaaatgaagctcagaaaggcttagtaacttgtccaaggtcacatctgctaagcccaggaggcagaagccctgttgctttttgggaaaactctgttccaactgcagtctccaataccctgtgaatcctttgtagccaaacctagctgtttttttttgttttttgagacgaagtcttgctctgttgcccaggctgtagtgcagtggcgtggtctcagctcactgcaacctctgcctcctgggttcaaatgcctcagcctcccaagtagctggaattacaggtgtgtgccaccacacctggctaggttttgcatttctagtggagatggggttttgccatgttggccaggctggtcttgaactcctgtcctcaagtgatccacccaccttggcctcccaaagtgctgggattacaggcgtgagccaccatgcccagcccaaattcctagttgttttgaggtattaagaaagatctggccaggtgtggtggctcacacctgtaattccagctactagtaggtcgaggcacaagaatcgcttgaacccgggaggcagaggttgcagtgagccgagattctgccactgcactccagcgagactgtcttaaaaaaaaaaaaaaaaaaaaaaaagccgggcgccatggctcacgcctgtaatcccagcactttgggaggctgaggcgggtggatcacgagttcaggagttcaagaccagcctggccaacatagtgaaaccccgtctctattaaaaatacaaaaaattagccaggctgggcatggtggctggcgcctgtaatcctagctactcgggaggctgaggcaggagaatcgcttgaacccgggatgcagaggttgcagtgaaccgagattgtgccactacacactagcccctgcaacagttgagactccatctcaaaaaaaaaaagacctatgggccagattcagtggctcacacctgtaatcccaacacttttggaggcggaggcaggaggattgcttgagtccaggagtttgagaatagtttgggcaacgtaagtgaggtttttgtctctactaaaaataaaaactagccgggtatggtggcatgagcctctagtcctagctactcgggaggctgaggcaggatgatcttttgagctcagaagttcaagaccagactgggaaacatagtgagaccctgtctctacaaaaaataaaattagccgggcatggtggtgtgcattgtagtcccagctactcaggaaaagcatttgagcccaagaggtctaggcttcagtgagctatgatcatgctgccactgtactccaacctggacaacagggcgggaccctgtcttaaaaaaaagtgggaagagaggtatgggggtgcctcacaccgatgttaggaaacacagggctagattttttttttggagacagggtctcactctgttgcccaggctggagtgcagtggcacaatcatgactcacttgcagcctcgatctcctgggctcaagtgatcctcctgcctcagcttccagggtagccggaatcacaggccagtgctaccacacctggctattttttttttttttttttttgagacggagtcttgctctgtctcccaggctggagtgtagtggcccgatctcggctcactgcaagctccgcctcccgggttcccgccattctcctgcctgagcctcccgagtaactgggactacaggctcccgccaacacgcccggctaattttttttttctgtatttttagtagagatggggtttcactgtgttagccaggatggtcttgatctcctgacctcgtgatccacccgcctcggcctcccaaagtgctgggattacaggcgtgagccaccgcgcccggcccaactggctattttttaaaaagtattatttttagtagagacatagactctctatgtggcccaggctggtctccgactcctgagctcaggcaatcctcctgccccagcctcccaaagtgttgggattataggcatgaaccaatacaccaaccctcccactttttttaaggttggcagtttcttggagtccctgcatgagggtatttgcactttcacaatcaggtcaacagacagggtggcaggtaaggattcaagggcttctggaagactctccactgcccacaagctggggacctctccccactagatctagatgaagtccaagaagtggtccacatttgccagccctttcttgggttcttacaggcatgtggtgtgccttccaacagacttcatctttctaagtaagatgagaatccccacttactggaaccctactgagcgagctttggagtgttagttaaatttagtatttggaagccgggcgtggtgactaacacctgtaatcccagcactttgggaggctgaggcaggcagatcacgaggtcaggagatcaagaccatcctggccaacatggtgaaaccctgtctctactaaaaatacaaaaattagccaggcatggcagcgcatgcctgcagtcccagctactcaggaggctgaggcagaagaattgcttcaacccaggaggcagagactgcagtgagccaagatggagctactgcactccagcctgggcgacagagcaagactctgcctcaaaaaaaaaaaaaaaagattgggcatggtggctcacacctgtaatcccagcactttgggaggccgaggtgggtggatcacgaggtcaggagatcgagaccatcctggctaacacggtgaaaccccatctctactaaaaaaatacaaaaaaattagccgggcatggtgatgggtgcctgtagtcccagctacttgggaggctgaggcaggagaatggcaggaacccgggaggcggaacttgcagtgagcagagatcgcaccactgcactccagcctgggcaacagaatgagactccatctaaaaaaaaaaaaaaaaaaaaaaaaaaaaattagtatttggaaacaaaaattagccccacaattagaatttaccaaggagataattcagtagcttatggaagactggctgctactcacatcttggctacagagcaaagaacctacctggaatatgtgagcaaggattttggccattttgggaaagggtatttgattatcagagtttcatcgaggatggtggatctgctcctgtttccagcagctgccgttctggctttttaattataagttactgttagtttggtttcatcattattaatttagtttgttgcatgtttggtttaccctgcagtatgtaaggatgcatgtttgccacaacagtgttctggcctataattttccctggaactgggaaacatgcactctttaaaacctgtttttgtttttgtttttcctttggttttgtttgttttccctaggggaaagtggaggaggatggccccaagtgcctgcctttgcttgaatgattgtggcctggtttagaagagtggtcttttaagtgtggggacagaaagaaaatattataacttgtatttatttttttttggtgcatactgtttaattttctatgcttcataacgtacacagaagtgggttttcaaaattttgtgctatcaaaatgttaggagataaggccgggtgtggtggctcacacctgtaatcccagcactttgggaggccaaggcaggaggcttgcttgagcccaggggtttgagaccagctggggcaaatggtaagaccctgtctctataaaaaaaaatttaaaaaattagccaggtgtggtgctgcccacctgtggtcccagctacttgggaggcagaggcaggaggattgcttgagcttgggaggtccaggctacatgagctgtaatcacaccactgcacttcagcctgggccacagagagagaccctgtctccaaaaaaaaaaaaaaaaaaggagacaactgacaactgaatgattcagaaccagaccttggggtggagacagagtagactgtgggagggactgtctgaggcagtgagtactatttctggtgcagccactaacttgctgtgtgtccttggctgcacaaatcactcctgggcttaagtttttcatatgaaaactgaagatgcttctggtagctctcaggaccttccaattctgttgtctgtagcggggcttgtatgattctcatggaggacaccaggtaggacctcaagctgagaggggtggaaaggcaagggagtgtcacagcaagctgaaggggtcccaagccttcaggattttcctcaggaccttgctctcttgtccccaggtgcgccaagttgctgctggaagcaggagcgacggtgaacctggcagcaggcgagagccaggagacgcccctgcacgtggcggcggcgcgcggcctggagcaacatgtggctctgtacctggagcatggcgccgacgtgggcctgcgcaccagccagggcgagactgcgctgaacacggcgtgcgctggggccgagggcccaggtagctgcaggcgacaccaggctgcggcgcgccggctcctggaggctggagctgatgcccgggcggccgggcgcaagcgccacacgccgctgcacaacgcttgtgccaacggctgcgggggcctggccgagctgctgctgcgttacggggcccgcgctgaggtccccaatggggcgggccacacgcccatggactgtgcgctgcaggccgtccaggactcccccaactgggagcctgaagtccttttcgccgcactgctggactacggggcgcagccagtgcgccctgaggtgcgctgggaggccctgacataggaggctcctgtgtgggggagcccgcggctggaactgctccgcttctggggaagacagagggtccaagagactgaaagcctgccctcagtggccagggggctgtccccagcttgggagggggagagaggattctgggagagagagtccaagggagggaagagccccagaggaaaactggggccaaaaggttggagcatacttgagggtggggtagacagaggcacaaaaaagggaagagagactcagaccttagccccccagattaggctaggattggccatgtgggtgaggcaagacttgggtctgccctcgggtgggggaggcatgtgcccaagaccctcttttgacccctagatgctgaaacactgcgccaacttccctcgggccctggaagtcctgcttaatgcctatccttgtgtcccatcctgtgagacctgggtggaggcggtgctcccagagctgtggaaggtatgtttgcctcagggccgagatggggaggagggacgagccacaggcctattccttcaggaccagcctcatggagggagcagcaggagggcccctgggtagagaggatgggtagagtggcacccctgggtttcagggtaccccctcccccggtaccccaggctgacccctaactccacacacctctcctgcctccctcacttgcatcagcacagacatttatctggcatctcttaacttggtgggcactgtgctaggctctctggggtgggagtggtatagacatagtggagacccttccctgaagtggagccccagcccgcattatcactgcagggcctctatggttctgaatctgagtcctttgagacacatgaaacacccaggtgggtgcatgctgcaaaatcccaggacccccaccgctgggttgcccccagatggtagggcaagggtcatctgaccttctttcactcctggcctaggagcacgaagccttctacagctcggccctgtgcatggtgaaccagccaaggcagctgcagcacctggcccgactagctgtgcgcgctcggttgggaagccgctgccggcagggtgccacccggctgccactgcccccgctcctcagggactacctgctgctgcgtgtggaggggtgcatccagtgaaccccatgtcaggctgtcccatggtgtgttctgcccctcccacctgtccccgcctccaactgcggaggaccagttcctggccctcttttcttttctttttgagacctagtctcactctgttgcccaggctggagtgcagtggcgctatctcggctcactgcaacttctaccacctaggttcaagcgattcttgtgccccaaacttccgagtagctgggactacaggcatgagtcaccacacctggctgattttgtatttttagtagagacagggtctcaccatgttggccaggctggtctcacactgacctcaggtgatccacccgccttggcctcccaaagtgttgggattacaggcatgagccactgcgcctggttgcctgcccctcttttctgtactccacgtgctgtcctggtccacctcactcctccatgggcttcttgagacacctgctgacctctagccggacctgagcttcagaccctctctccagcaggaagggctgcagactcggcctgttcccagactcggccttcacctcccttctcctcctgtgtttaagtggatggcccctctatccatccaggtcccatgccaagaaccagtgattctagtggcccaccacctccctctcctgccacccttatacctgttcagcctcctaaagagggacaaactctgtctctgcgtgcactggcttgcctgccctgcctttgtcactccaagggagatcttgagacccatgccctgaattggtgctggaatggtctttgggagtcaaactctgatcatgccctccagtggctcctctcacactaaaatcaaaactctttaaaacaagctgagtgcagtggcttacacctgtaatcccagcactttgggagactgaggcgggaggatcacctgaggtcaggagtttgagaccaacctgaccaacatggtaaaaccctgtctctactaaaaatacaaaaaattaggccaggcgcagtggttcatgcctgtaatcccagcactttgggaggccgaggtgggcggatcacgaggtcaggagttctagaccagcctggccaacatggtgaaaccctgtctctactaaaaatacaaaaattagccgggcatagtggcggatgcctgtaatctcagctactcaggaggttgaagcaggagaatcacttgaacctgggaggtggaggttgcaatgagccaagatcgcgcaccgctgtactccagcctgggcaacagagcgggactccgtcttaaaaaaaaaaaaaaaaaaaagtcttccgtgaggagcgcagaggaggtcgcggcgccggaggccccagaaggctcgaaggcaccgcgggctggggtcggtggcttagggagcccgtctggccatggtggccgcgggtggtggttggcgcggctgcgctgcggcccggggcagtgcggactgggacagtcgcggcgctgacgcccgcgggccccagctgcagatatgaagcggagccgctgccgcgaccgaccgcagccgccgccgcccgaccgccgggaggatggagttcagcgggcagcggagctgtctcagtctttgccgccgcgccggcgagcgccgcccgggaggcagcggctggaggagcggacgggccccgcggggcccgagggcaaggagcagccgcctgccttggcctcccaaagtgccgagattgcagcctctgcccggctgccaccccgtctgggaagtgaggagcgtctctgcctggccgcccatcgtctgggatgtgaggagcccctctgcctggctgcccagtctggaaagtgaggagcgtctccgcccggccgccatcccatctaggaagtgaggagcgcctcttcccagccgccatcacatctaggaagtgaggagcgtctctgcccggccgcccatcgtctgagatgtggggagcgcctctgccccgccgccccatctgggatgtgaggagcgcctctgcccggccgagaccccgtctgggaggtgaggagcgtctctgcacggccgccccgtctgagaagtgaggagaccctctgcctggcaaccaccccgtctgagaagtgaggagcctctccgcccggcagccaccccatctgggaagtgaggagcgtctccgccgggcagccaccccatccgggagggaggtggggggggggtcagccccccgcccggccagccgccccatccgggagggaggtggggggtcagcccccccgcccggccagccgtgccatccgggagggaggtgggggggtcagccccccgcctggccagccgtgccgtccgggagggaggtgggggggtcagccccccgcccggccagccgccccgtccgggaggtgaggggcgcctctgcccggccgcccctactgggaagtgaggagcccctcagcccggccagccaccccgtccgcgagggagatgggggggtcagcccccccacccggccagccgccccgtccgggagggaggtaggggggtcagccccccgcctggccagccgccccgtccgggagggaggtgtggggggtcagccctccgcccggccagccgccccgtctgggaggtgaggggcgcctctgcccagccgcccctactgggaagtgaggagcccctctgcccggccagccgccctgtccgggagggaggtggggggtcagccccccgcccggccagccgccctgtccgggagggaggtgggggggtcagccccccgcccggccagccgccctgtccgggagggaggtggggggtcagccccccgcccggccagccgccctgtccgggagggaggtgggggggggtcggcccccctgcctggccagccgccccgtccgggaggtgaggggcgcctctgcccggccgcccctactgggaagtgaggagcccctctgcccggccaccaccccgtctgggaggtgtgcccaacagctcattgagaacgggccaggatgacaatggcggctttgtggaatagaaaggcgggaaaggtggggaaaagattgagaaatcggatggttgccgtgtctgtgtagaaagaagtagacatgggagacttttcattttgttctgcactaagaaaaattcctctgccttgggatcctgttgatctgtgaccttacccccaaccctgtgctctctgaaacatgtgctgtgtccactcagggttaaaaaaaaaaaaaaaaaaaaaaaagccaagcaagcgtggtggcgcatacctgtagtcccagctacttaggaggctgaggcaggagaattgcttgaacccgggaggcggaggttgcagtgagccaagaccacgctattgcattccagcctgggtgacaagagcaaaactctgtctcaaaaaacaaaacaaaacaaacgagaaaacaactcagtagaacagagcctctagcctctgccaaattatctggcctcttgacttcccttcttccttccaaggttcatctccagccttagtaaacaagtcaccagttgctggatgtgacctgctcctctttgctttcaggtgtttgcatgtgttattcctaccgcttggaatactcttccacattttttggcctggtcaaggctgatctggccctcaggactcagttccaatagcactatctctgcagaggcttccttggtacttatttaagtgcctgtggttgtctcaactaggctgagactggaactatattccttgaacaggtattttagtaaatgactgcggaaggaggaacatccatgagcctggggtccatctatgtgctccctccgtccccaagtgatgaatggtgtcttaaacagtggtcaccacatacagtctctgagggcccagccaccaactgcccgaattccccaacttcttcctcttgtcccagagtcaaaagtaccacaatacagcttttggaggaagcttttcaaagcaagccagtttttatgagtgcaaataaatgattagtccatggaaccaaagtatggatgttgtttgacttaaatgggacagaggtccccatcattccatgttcattccccaccccctggtgctgttctgtggtttccaagttttctgcattgagcaactgttacaagaacaacacaagggccaggtgccgtgtagtcccacctacaagggaggctgaggcaggaggatcactggaccccaggagtttgagaccagtctgggcaagagtgagacactgtccctaaaacaatttttttttgagacaggggctctctgtgttgcctaggttggagtgtggtggcgcgatcactgctcatagcagcctcaaccttccacactcaagcaatactcctcccaagtaggtggtactacaggcatgcaccacaacgggtctcactatgttgctgaggctggggaaaaaaaaaggccaggcacggtggctcatgcctgtaatcccagcactttgggaggccaaggggggcagatcacttgagtcctagagtttgagaccagcctgggcaacataacaagatcctgtctctagaaattaaaaaaaaagaaaacacaaaatacttagccaggcgtgctggtgcatatgatggttccagctactcaggaggctgaggtggtgggaggatcgcttgagtccagcaagcagaggtcgcagagagctgaggtcacagcaagctgagattgtgccactgcactccagcctgggcgacagagtgagaccccgtctcaaaaaaaaataaaaaaatgaataaaaataacagaaacacaaagcctctcatagacccagaacctatagtacctatcacaggagggaactggggaggagctcccagcagtcttctcctgagtcagcagtctttttgctgagggatcctagggtctccagtcccaataccagttggagttatacagtggagacagggatccaaagtcctggggtctgcctcctgctgcagctgcccaactttccctcctccaggagagttatatctttgggattccatttcatcaacacaaagacagttttttcaccttgttatgcagaatgcaacaccccctttctggatgaaaatttgtgctttagttttacagagccaaaaggcctgacagaagaaaaagaactcctccctagagagggaggctgggagcctcactctcaggggcaatgctgaactttctacccctttacagcacgccgaccacagccagctcagccttttctgatatatttacaactacaaaagataccgttaaaaaagaaaaatacctgggtgcagtggcttacgcctgtaatcccagcacttggggaggccgaggcgggtggatcgcctgaggtcaggagttcaagaccagcctggctgacattgtgaaaccctttctctactaaaaatacaaaaagtaggccaggcgcgatagctcacgcctataatcccagcactttcggaggccgaggcaggcagatcacctgaggccaggagttcgagaccagcctggccaacatggtgaaacccttccctactaaaaatacaaaaattagccaggtgtggtggcacacacatatactcccagctattcagtaggttgaggcaggagaatcacttgaacctgggaggcggaagttgcagtgagctgagatctcccactgcactccagcctgggtgacagcaaaactcgtctccaaaaaaaaaaaaaaaaaaatcaggatacaaggccaggtgtgcaaatcctgttggtggacaaatcgcctctttgggggcaatttggccacttccttaaacactgttcccagttacacaaaaggcaggctacatacaggaatattcctctcagcgttgcttgcaacaactcatgttggagtggttagacaaatccatattacccatggcaggaaagaactagggagggattccaagtgaccagcatgtgtactgccttgggaagatctcccagagtggtttttattgattgattgaaacggggtctttctgtatgccaggctggagtgcagtgacgcaatcacagctcactgtagccttgacctcctaggctccaatgattctcccacctcagcctcccaagtagctgggactacaggcacacaccgccaggcctggctaatttttaaattttttgtagcgacagggtctcgcaatgttgcccatgctggtttcaaactcctggactcaagtgatcctcccaccttagcctccccaagtgctgcaattacactctagagccaccatgctcagctgaagacaattattttcctttacatttttttttattttgagacggagtctcactctgtctcccaggttggagcatagtggcgcgatcacagctctctgcaatcttgaccctagggtcaagcaatcatcccacctcagcctcctgagtagctggctcatggctcactgcagccttaacctcctagggtcaatcatcccacttcagcctcctgagtagctgggaccacaggcacacgccaccatgcccagctaattaatttttttttagagatgggggtctcaccatattgcccaggctggtcttgaactcctggctcaagggatcctcctgcctcagcctcccaaagtgctgggattacaagtatgagccactgtgcccggctttgtgaatgtacttaatgccactgaattgcaaacttaaaaatagttaaaatggttttaagttttatgttacgtatatgtatatatttatctttagagatagaggtctccctgtgttgcccaggctggcctttaactcctgggctcaagtgacactgctgagtcagccttcagagtagctgggactacaggtgcatgccactgtgcctagctatgtttattttaccacaatgaaaggacttacaaaaaagaagctagacaccgaagaggatacacagttggattccatttatagcaagtacaaaaacaggaaaaactaatgtatggtgacagacgtcagaatagtgattactctttggaggttaatggctagaagaagacatgaagggggagattctggggtaattctttcttttttttttttttcctgagacagagtctcgctctgtcaccccagctggcgtgcagtggctccatctcagctcactgcaacctccgcctcccaggttcaagccattctcctgcctcagccttctgagtagccaggattacaggcgtgcgccaccacgcccggctaatttttgtatttttagtagagacgggatttcaccatgttacccaggctggtcttgaactcctgaccttgtgatccgcctgccttagcctcctaacgtgttgggattacaggcgtgagccaccgcgccagtcctaattatctatttcttgatctaagtgctacttctgccagtgttcagttggtagaagccaccgagctttttgcttatgtttgcccctgtctggattatttatcctttaatcagtagttctccaaaaccccaaactccagcgcttttttttttttttttggagacaaggcctccctgtcgggtgcaatgcagtggctcagatcatagctcactgcagcctcgaactcctgagctcaagcgatcctcccacctctgcctcccaaagcggtgggattacaagagtaagccactccccccggccacagtaagtttttagaaaaaattttaattgcggccgagcgcggtagctcacgcctgtaatgccagcactttgggaggccgagacgggggcggatcacctgaggtcgggagttcgagaccagcctgaccaacatggagaaaccctgtctctactaaaatacaaaattagcggggcgtggtggcgcatgcctgtaatcccagctactcggcaggctgaggcaaaagaatcgcttgaacccgggggggcggaggttgcagtgagccgagatcgcgccattgcactccagcctgggcaacaagagcggaactcccgtctcaaaaaagaaaaaattttaactgcaaaaatctggataagttcttgaaagctggacttttccccctttttgtgtcctaagcctgcgccgaatctgtgccttctttgaaatgctttcccgccttctttctccgggtcccacactacctggggccgcactcttcaagcactggatgctgactaactggtctccttatctgtcttcccgactggcccagagctgagttcttactaatccccgctaacctggagttaggtgcgcgttgcaaagcagtaacgaatccaatcagccggggaggcagacagcagggccggaagaacaaagctggaaagggaaacgtcgcaccggctctgcccagcggcgccagcccgggcaaccttccgcagtcgcgaagccacgcccctttcccaagtacctccgcgctaactcctcccccctggccccgcctctcaccctggattgcctaaggccccgcccaccaggcgtggccccgctctgggagggccgcaatcccgccaacaatgactccacccctccttccgctgagaaacctgtcccttttatttaaagaataccttttacgtcagcccgtcttacgcagcttcgcgtcatcagtgcaaggcgcggaggcgggacttcctgtccctggtataacagcttccgggagaagccggaagagaccggaccctgaacagaatcgcagattgccagcccttttcccgacccctacggaaagacgagtccaggggccgtcctggcgaggtcaaaacatttagtctggtcttttcaggtgaggacttccccatccaggcacagtgccggtccaatccccctttaatttcccatgactcctcgcgtcctgaagccccgcccccagttccccagccccgccccgaagtttgaggggtgtggacggtttgtgacccccttagccgaccctactcctcactggccgggacaactggtcttatcacggaggctggggccaggcagcccttcggttcgggtgggcccatggaccccagtccaacgccgagggaataggaccatccaaaagcggaaccttcgcctcagaaaaagggtgcgggacccctcctcaccgtgcggtcacggtacggacagggtagatcacaggctgagggacagagcaaagacccctgaggccggacacctggggtcctgccgggcccctccccacgagagttccctgtgtctgtgccaatcgttttcgtctttctttgccgcagtttcttttcctgtaaatcatggttaataacattaaccttcttaccatcaggggttagttgtggttgtgataaataattactaccgttattaagcaattgcaatttgcagtgtgccaggcactgtgccaagtattttgcttcgatgatttcacgtcatcttcaaaacaacctcatgaggtaggtactgtttttaaccccattttactgatgagaaagctgaggctctgagaaagttgtctgaggtgttatagctagtaagacgcaagactggggttataattagttgtttttctaactccagggccggtatattaaataaggatgttgatgtgttccacagataattctttgagcaactactggggcattatattggacacttcagtaccaagagaaatacatacgatccttgtctaccaggagtctaatagaaagatggacaggtacataagtataatgaagttttataggtgctgtgagaatagtctgataatggtaatcaccagactggatttgcccagggacagctgtgaaagcagcagattctccaagggaaatagtaggtactccaaggagcaagcagggacccttcctgcctttctaagaaactgcagcagcagaaccttcacagtgaaagaagagagactgagatatggattgtgagagctgttatggaatctttttcaaatcactccacttggggagtggtcattgcaggagtgggcccatggtgacccaggaaggtggtgcttctggtgtctgtcccaagttgctccccagggcttgccagaagtttcagaggcggcacataatgtctgctgcatagtatctgcccgcggtccctacagagttatcgttttagatttgtctgactctgcttttgatggtaggtcagttttctttggctcttgacatctggcagcctggatctgtgaccaggaatgaaataggctcaaatgagacaatctggcagggatggctaaacagtgcttccaggggggccccacagtaaaatattccaggcttttgggtctctctgaagccactttggaggctgcttaggaggcatatttgcttgaccaagcgatagaaatcctagagaaactcaggcctcagcaaagatttttcctcattcaccaaaaaagcaacaacagtagcagcagcagcaaggctgtgggcttttcctgctgatccacactcattgggaagttggagtttgagagaggaaggtcacagaacgtgaaagcaagagtttcacaatagaggcaaagggtagggtaggtctttaggtttaggttggggtgccggaattaggaaggtttgtgcccccttctacacaacactgaactccttttttttttttttcagggctgggtcagttagaacctaaacaaactagagacctggttgcaacccctcaggctctgctgatgctgtccccctttgttcctgcagcgtggaccctgccagcagccaggccatggagctctctgatgtcaccctcattgagggtgtgggtaatgaggtgatggtggtggcaggtgtggtggtgctgattctagccttggtcctagcttggctctctacctacgtagcagacagcggtagcaaccagctcctgggcgctattgtgtcagcaggcgacacatccgtcctccacctggggcatgtggaccacctggtggcaggccaaggcaaccccgagccaactgaactcccccatccatcagagggtaatgatgagaaggctgaagaggcgggtgaaggtcggggagactccactggggaggctggagctgggggtggtgttgagcccagccttgagcatctccttgacatccaaggcctgcccaaaagacaagcaggtgcaggcagcagcagtccagaggcccccctgagatctgaggatagcacctgcctccctcccagccctggcctcatcactgtgcggctcaaattcctcaatgataccgaggagctggctgtggctaggccagaggataccgtgggtgccctgaagaggtgagtggcctgggaagtgggaagctgcttgtgctcatcccccagcccttggttgcctctaaggaggctggtgcagacatgggagctgcagcaaagtgtaagatccagcccctaccaagggcaggtagatactttcttagaaatacacccttcaggccgggtgcagtggctcccgggactttgggaggccgaggcgggtgcatcacgaggttaggagttcgagaccagcctgaccaacatggtgaaaccccatctctactaaacatacaaaaatcagccgggcgtggtggcgcacgcctgcaatcccagctactcaggaggctgaggcaggagaatcgcttgaacccaggaggtggaggttgcagtgagccgagattgcgccactgcactccagcctgggcgacagagtgagactccatctaaaaaaacaaaacaaacaaatacacccctcattagttaaggataaagatgaggggggcctgtcgcggtggctcacgcctgtaatcccagcactttgggaggccaaggcgggcagatcacaaggtcaagatatcaagaccatcctggccagcatggtgaaaccctgtctctactaaaaaaaaaaatacaaaaattagctgggcatggtggcgcactcctgtagtcccagctactcgggagggtgaggcaggagaattgcttgaacccgggaggcagaggttgcagtgagccgagatcgcgccactgcactccagcctggcaacagagtgagactccgtctcaaaaaaaaaaaaaaaaaaaaaaggataaagatgagggaaaaaaaaatccaccctccagtttttccccactcccctgctttgttggtccaggcctgtttgccttctcattcctcaccctctatcttttcttccatgtctttcatccttacagcaaatacttccctggacaagaaagccagatgaaactgatctaccagggccgcctgctacaagacccagcccgcacactgcgttctctgaacattaccgacaactgtgtgattcactgccaccgctcacccccagggtcagctgttccaggcccctcagcctccttggccccctcggccactgagccacccagccttggtgtcaatgtgggcagcctcatggtgcctgtctttgtggtgctgttgggtgtggtctggtacttccgaatcaattaccgccaattcttcacagcacctgccactgtctccctggtgggagtcaccgtcttcttcagcttcctagtatttgggatgtatggacgataaggacataggaagaaaatgaaaggcatggtctttctcctttacggcctccccacttttcctggccagagctgggcccaagggccggggagggaggggtggaaaggatgtgatggaaatctcctccataggacacaggaggcaagtatgcggcctccccttctcatccacaggagtacagatgtccctcccgtgcgagcacaactcaggtagaaatgaggatgtcatcttccttcacttttagggtcctctgaaggagttcaaagctgctggccaagctcagtggggagcctgggctctgagattccctcccacctgtggttctgactcttcccagtgtcctgcatgtctgcccccagcacccagggctgcctgcaagggcagctcagcatggccccagcacaactccgtagggagcctggagtatccttccatttctcagccaaatactcatcttttgagactgaaatcacactggcgggaatgaagattgtgccagccttctcttatgggcacctagccgccttcaccttcttcctctaccccttagcaggaatagggtgtcctcccttctttcaaagcactttgcttgcattttattttatttttttaagagtccttcatagagctcagtcaggaaggggatggggcaccaagccaagcccccagcattgggagcggccaggccacagctgctgctcccgtagtcctcaggctgtaagcaagagacagcactggcccttggccagcgtcctaccctgcccaactccaaggactgggtatggattgctgggccctaggctcttgcttctggggctattggagggtcagtgtctgtgactgaataaagttccattttgtggtcctgcagcctctttctgtgacagagaatggctttgcgctgcccccaggaaaatggtaatgagagtaggtaggccggggctaccaacgggagatgcagtttatttacaccagcagccatgggggcagagggaatacacagcgtttacaaagttagctacctgtacagaatggattacatatgcaaaaataaaaatctcaagaccacaggacagcgtgagccccacccccctcccccaatgaccccagcatgcggtaatgccaggcgggtggcccctgggcatgcgggggggagtgatgcatggaaggaaaagccaccggccatggaaattagtacagaacccccccacacacactcagacacaggatacagggtggacgacacctagccggggtgggaaggatgggaattgaaacccacacagcctgctgttagagggaggggagtggggagctcctagcccctgttcaactacatggtagggggggcactctctccccagaaggaaaagggtttgttccctcagggtccctgctggaccaagcccatctcttacccagcctgggcagggggctctgccctgagggcgggccaaggaacaatggggaagtttatgtggacaaaccagttcccaagctacttcccacttctccctcctccaaccagaaggggggaaaagggagaggccacagggcaaagagtgtattagggcctgagctgcagctgcctctcagaagggagagtggcccacagccttcctcccttcaccttcagcccactccccagactgcatctggaagcggctagaggcctgctgagatcctcctctccctctggcctcctctcggagggagactacggagggccaagaatagagaagcccaggccccgggatttattctaactcctgccaaaatctgtttggctttttaaaaaataatcacaatttgtgggttaaaaaccaatttgcaaccaggcatgagccacaatcagaaccaccccagcgggagagcggagttccagacagggcattgcagccccatctctgttgttcccttaaccctctagggtccctaacccgatcagtccaaccagtcctgggtactaactacccaaatgtgggatggctcctcttgggaagagggtaggggacatgtccagcaagtgccagagaacttggctcagggtcacctccacccatgtcagtcagctctgctcccagcccaggtcgcggtcctccagcttggctcctgggagtggtggtgcccgcatggaggggggacggtacatctctttaggatgtagaccaggcaggtgggcacactggcatgacagtcccacagaggggcagtgacaccccttcccctccactgacaacctggggcacagaggccaccctctcttcccacccaactcctagcaaagggggagaggcacaagattaggattttcctcagagccccaaaccacaagtacagaataaataacttaaaagcgctaaggaagggaaacagggcacgctttggaggcaggagcgctgagaggaactgaagccagtcaaggtgaagggggtggaagcagcagttgggaacctgggctgccccggtagggcagtggggcagggtgggcaggaggaacacggggccaccccaggagggtgaggctgggtcccttcctggggcagggaatgaggtaagaaaacatttcaaataaagcagcaccgttccctctcaccttggggccccactcctcaccagccctgggtcagggaggagaggcagggggaggaattctgacacttctccctcttcctaccctccctttcccattccttgaagctgtagaggctggaggccctttcctggcacccaacaaaaggacagctcctgctgccaaggaggcccatggggactgaggggaaagggctgcccctgtgaggggcagggaaggtggcggcagttctggacgcccacctcagcagacagcactctgtgcctgcctacccctgggactgggggcatttgataagattctgcacacagacaggacatgcccagccttgcccctcagctccaagcaccggacccattcacattgctgagggcggccgaggcaggccccctccaggctcagcttccaacccacagcctcccgggtcgccacattgcccctcagcagggcttagtccagttcctggggtggggggcaggcagtgccctggcacagtgcccaggtcaggcccctggcctagctggacatccagtaactcacagaataaataggaaaaccgcctccccaccaaacttatgtccaaggcataatatgtccaggtctgagtcctgcacgccgaggagtcgtgctccattgcagaggactttgacaccccccaggggcgcataatcggatcctctgcctgcctggcccaccaagcttcccaagccccaacccccagcagccgtccatttgccaggctatgccacctgggtgggggtcaggagagagggctctgctcagccaaaggctatcccttgcacccaagtcagttgatgtcatcatagatgctgggcgtcgggggtgccggtggctttggcttcttcttcttgttggaacctaggccggaggcagtccctaccaggctcagatgggatttctttttcttggttttccgtgactcagagctgttggtacctgtagagaaagagacacaagggatgagagtatggttatggcaggagaggtggcacccccatggctttgggcacagagcccctagggcccaactgcatcacgtacctagaccccatccctgattttcactcgtcttggaggagcctgaatcagagggtgagaggtcagaggagccgtcccactgaagccggctgatcagggcctggctgtcagtcatgtcaaagctgtcattatccagggagctctcgacctctggaaggacactggaaaggggatgagccaaagaagggctttagagatagtgatcatcgccctaactggtcacaaccccccacccttcctgtagggccacttacgccgagggcccgagaaaataaatccgtacggttcgcctctgctcatctgtgtgctgtgggcagcgcagggacctggtggtgaggcaaggcagggagggttctgaggaactcaggtaaagcccctcccctcggcaaggcaggagccacaggcacagacagggaaggggtgaatgcagattcatccccagattgtggccaaaggcctcatcattagaggagggaaggggaagggcaggagccccattgctcaagtccaggggtactcccaacccatgcccatggtgagtgtgcaggaagcgcctggccccctttctaggttctgtgctcaccttgtgcacatcttcttggtgtgttcagaaatcaccccacattgctggaagaggaatataagctgaaaggagggatggaaggaacctactctagatgttagatgtttctttctgtataaatgctagatagcacaagcagagatggcccaaaggtgtccagagcagatggtcccaggacactatgggccgggaaacctaattccagacagagagaacgatacggccctgactgctaggtcaccagcttcctcccaggccttgaccactgcctatggctccagcccactcccagggaccttctctcttgctggtcctccctcaccgtggttagcaggctgcgaagctcctccggccccagggtctcatagctgatcccagttgaattgttatactgcaggacaaccagaggtacaggttagagatggggcagagaaaagagaaggacaggggtggaagtgagaatcagtccctctggtccctttctaagtgaggctttagaacgaccctgccgttttccaagtgatttctctcatcccatctgccaatggataaggggtgggactcagaaagaacataaatatgtaagatccaaatagctcatcagtgcctctggctgtcagcattctgatccctacttgtccaaatccccaccacctcacaaccaggacaatgagagcaagcatgaggggcggcccatactcaccttaaaaggatccgaattgctaagttcccctgaagaagaaaaaagaaggggaagggtgtttgatgcagaggtacagacagagaaccctgaaaataaccagagaggaagtgggggtgacagaaggatcacaggccctccctcaattcccctatccccgggccccacctccaccccccggcaatgagtcccagaagacacagctagaagcattcccattgctccggctccacttaccatttttgtgttttaatgacttggatcttcgaggggaattggggttctggaatgggagataccatagctttggggaaagggtaacgaaaagggggagccgagaacccagggaaggaaaaaagatttgacaaagcagcatcctcaaattcctactcttcctccccagtaggaggcctgtctacccatgtgccctcccccaccccccttccccacccacactcccccgccccggacccaccaaagacaccctcaagcccccaatgacctcagccttgagtcatgacactcgaggactccctgcccaaaggggagggtatctgtcctttacccattatttccccaatgcctggcccggctctcaccttgtctgactttctcttcttggctgtgggaaacaaaagcataaagagcagggtttccgttaagttctcaatctaaaagcatctcaagaaaaccatacaacaggctgggcacggtggctcatgcctgtaatcccagcactttgggaggcccaggcgggcagatcacgaggtcagaagatcgagaccatcctggccaatatggtgaaaccccatctctactaaaaatacaaaaattagctgggcatggtagcacgcgactgtaatcccagctactcaggaggctgacacaggagaatcgcttgaacccgggagacggaggttgcagtgagccgagatctcaccactgcaccccagcctgggccacagagcgagaatccatctcaaaaaaaaaaaaaaaaaaaaaaggaaaaggaaatcgcgtaactacactctctcttcatcattcaaggcaacaatttgtgaccactgtatacccaattcctgcttcccacctcatcccaatgccccccgggtttccccagatccccaagcacctttcttctccgagccataggaccagtcgttgtcattgatgtcatcattatcttcttggtcactctcagacttattcatattgttgctattggcaatcctgccaaggggagggaagagaaaggggccaaggggaaggaagagaaaggggtcaaggtggtcaccccgctctgcccccaacttcagaagcaggtggagcatctggggccaagtaaaacccaccctctgtaccttcccaatgcccccgggggactacaccatggcacaggctgcagagaacgggcagctctggttccctcaccggcggttggcgattcggctgctgttccgacccattcccaggcacttctccagatggggagcaaagcgggaggcggcaatgctgcgactgcaattggggcaaacacactccttgctcttccactggttgaaaacctgtccaaagatgtccaagcccggctggtccacgatctctggggacaggagaggctggcgatcagggtgggcaggaccctctcctcttgttcccacctggggtcccacggcctcttcaatccctcccccggctcacaggagctccaggtgctacatctagcacagtttccagagaaggaaactccaggcagtcccagggaagggctggactgctgctccttcaccctgaagctcaccaaaatccttcatgctatcagggtccgtgtcgtccaagaagaagtagccacacttgacagcccggtgtacctcaaagcagaatcccaaacaagaatcctcgaccaggtccgcgtatatctcctgagcgatggcctgggccccaggggagaacatctacggtcacaagagtcacagccccctggactctcaccaaccaaatctgctgccaactggccccagccaaaaatcatgctttctttgccattttccccatcttgacttcgtgttctttcttcttcctggatccttggctttttcagctggctattccctttaaggaacaaggctgactacccaaattcctctttggtgtggatgccagatacagcgacgtagagacatcaagagaaagaactggaggcacacgtgggggagccctcacctctagtttgctgttatccaggccagacaaagacatttcctccattttcatttgtaaactcttgtggagacggcgctctgactgctcatagcacagcgggcggcaacacggctgcacacacgggggtgggggtgttgttgtgagtccaaggcacctctgaatgcggccaccttccctccccacctcgctgcccaaagctcagtcctggcatcagggtctctccctccccaaggcccaggctccctaagtctggatggtccttcaaggcctgaaacctaaagggggcctagtctttcccaggcctgagctcaggccctggactccactgccaatcagagtctgggtctataggaggcagcagctcaccctaggtccccaaaactcaaacccctctttgatacccatggtgcaatgcagcagggggaggagaaggaactccaaggcctcaaagcaaacccacagggtgtggcaaagaactgcacagactcctaaatacaccccccgccttccctaaagactctcctcagagtcacctctgctttcagccaggatgtccacttgggggggtactgctaccagaagtagaaatggccctaggaccctacaaccttcaccccactctgtcttcccttgaaatcagcctgccactccacgaggggagcagagcccacaggagcctagagctaagggacatttctagccaccatgagcaggaacggcggggggtgggggggaagagcctggtagggtggcacgccaggagcgggcactccccttacctgttcttcctttaaataaccacccgccctccctcaggaccagcccggaagtctctccaagagccccaaagtccaggaacccccacccaaggattcagacacagaacccacaacccagggcccctcggaacggtgggtacgagtttcaggagctgccggcctagagtggggtggggactgacgaatgagccgggggcactgggaagggtaggaggccgggcctcggctcttcccccgtccctgcggcactgctgctgcatcataccgactggggggaggacagccgagccgccggggccggcgccgggccgggacagaccgacccccagagagtgggacgcgtcccagcccctctccttccccgcccgccagcagccccggccggccggggagaggagtccgggagggtgtctctattgtcccgggggctggggcctggctccctaacaaaggccccgcgccccctccccggccggccctgccccgcccaagggggacccagacgggggagagccaggggccccggcccggccgggaagctgggggaagccgggcgtttccgcgtcggcccggggggaggggaaggggcgctgacccagacctggggggagggggcccaagccccgccttgggccccgccccccgccccccacaggcccctcccccgtccccgtccccgtctccgtcccgtactcaccccgcccggggggccgcgccggggcccggcagcctctcagggccgcgtcctccggcggcggcgacggcggcggctgctccggagccccatgtccgtcggtccgtcctcgcctctccccggggcccagggcccggggccggggggtcgggccgcccccccgcctggccgcctcaccgggcggccatggccccttcccctcccttcttgtcccgtcgccgcctcctcctcctcacctcaccccgcccgcgcgcagtccgcgcgccgtccgcgcgcccctccccccgccccccactccagcccgcctctcccgggcggggggtgcggcgcgagcccggagcgcgcgcgcgtgtgccgcgaccggaggatggatggatggagcgagcgtgaacgcgagcgtgcgcgcgcgcgcccctctccccctccctctgcgcgggcgcgaggccaagcgcgagcgcgctccaacctcctcctcttcctcctcccgcccctccccaacaccccgccctccccctcccttcctcttccttctttcgctttcgcgcgcccagcgactgctcgcgcctgctagaagggcccgagcgcgtgcatctgccccgcggccgcagctcggcagcatttgctccagggggcggggaccgggaggggaggaggggcgccacgccgccgtccaaagtaccggcggacggggacgggggcggagagatgggcggggccttcgcggacctccccgaccaatcgcagggaggcctcggcccgggaggaccaataagatgggggtgggtggggcggcgttcaaggtgaggtgcgcggtgcgctgggggcggagacgttttgccgtcccggccggctcgggggcgggggcagcgggtggcgtcgaaagagagcgccggctgccagccgagcctgggacgccttccggcccaggctcccccgcccttccctcggggctccccgctctctcccccgccaccctccgctcccccctttaccccgaggcgtgcagccacttctgtgaagaggccagacttgaagtggggcgcagttaggacctcggggcggaaagcctgtggagcctaaggggctcgcccgcgcctcagttctcccggtttctgggcgggtctcagcccactccaggcttgcggaccaacaagcggccgagatgagggtccgctgctgaggtcggaggccgagctgcgcccttctgcgcggagcgccctccccgcccctcgtcctaatttagatcccacacctgctcgcctttcctgcttccggaacccacgctggacccccacccctccagacagcctccttgtcactggccagatccttcccccgacccagtgctgttcccctgggtgcagcgtgtccctgtgctcacgctctcagtccctctttaccttaggaagggacaggccttttcccagccgcggtggatggctggattggcgctttcatctcggttactctgtgtgtggtgtcctggaacggttgtgtgacagccctctcccctcaagagataagattaaaaaggaggatagtctgtaatcacatacttggagccatctttggtttttagttttcagcaaatacttatttttttctcaccgatttctcccgagaaacagcaaacatttattgaggcgatattccagagtagttcagatcaggcgtctgatttgaatttaaatcgttgggcctagcaaatgagtttcctgtgcctcagtttcctctgttgtcagtgggcataatgatagtcctatctccttgcgttgctgtagtgattaacaagtcagtgcatgtgaaactcttagctctgtgtaagtgcttggtaaatcttagctgttattctcacggtgctccaggtgctgggataaaagatgatataagacagttgtgcttcttcaagaagttcactgtcttgtggatagataggtaggataataattgcaaaacagtgtgaggaaaacaacagagagaaaacagaggtagacaaaaggagacatcaaatgatgtaagagagttggtcaagaaaggcttcttgggcagggtgcggtggcccaggcctgtaatcccagcactttgggaggccaggagttcgagaccagcctgcaaaaatgcaaaaattagctgggcgtggtggcgggctcctgtaatcccaggagctactcgggaggcttaggcaatagtagtaatccagctactcgggaggcttgggcaggagaatcgcttgaacccgggaggcggaggttgcagtgagctgagattgcgccactgcactccagcctgggcaactgagcgagactccgtctcaaaacaaaacaaaaaagaagaaaaagaaaaacttcttatagagggagatgaaccaggtgaaggtaggccaagaaggcattggacatccccaactggaagcttcagaagcatggatcaagctggaacagaggagtgggtggcagagcagcaggaggtgagcaggctggataatacaggacaaagcaaagtaggtgttgaaaagtttgtgggctttagcctgtaagctgtgaggagtcctcaaggggaatcattcaccagacttatatttttagtggatcatgctggagtatggtctggagaataatttagaagcagtaggttttttgttttgttttgttttgtttttttagacagcattttgctctgtcactcaggtgcaatctcagctcacggcaacttctgcgtcccgggttcaagtgattctcatgcctcagcctcctgaatagctgggattactggcgcacgccaccacgctcggctaattttagttttgtatttttagtacagacagggttgcaccatgttggccaggctggtctcgaacttctgacctcaggagatccgcctgcctcagcctcccaaatgctgggattacaggcataaaccactgggcctggcaaaagcagtaggtttttgttactgattgaggtgtgtggaggaaaggagagggaggtcttgaaaacacctttactaggatggggaactcaggggaggacatgggaggacacaggatgacttcagtctgggatatattgaggttactgtgggatcagctgatggagacccaaaaggtggttgaactcaggtctggcacagagaagtaagctaggtcttcaggaacttcaacaacatcgcctcaacctttgttttctcttatctcccgcctccttttcaggaattcttcactccagtgatgctgatctgtttcttacctaaatatgcccagtacattctgccctaaggaatttgcgccatggccagaaaatcctcctggcttctccctgtttacctaaatccttcctcatatccccacccatggccatcctcataccaaacttctttacaactagactgtactattcattctgtgcttggcctgggctgctctgtggtggtgacctctttgggcacgtgcccagtctccacagttagcaccagttcataaacactaaggcctgagctggtcctgactctgggtgaggccctggggttacagcaacaagcaagagagacacacaaaccttgtcctagcgcagcttacagcctagcaaggcctgatgtgaaggaaataaggcctgagtgtgaaggcattcaggctgctgaagaaacgtatagtgtggagaccttttttctcaggagttcagggaaggaagtggtcttttaagtggagaccagaattaactaggcagagagaacaccatgtgtataggccctaggagagagcatgttatgttcgagacatgaatggtcagtgtggctagagtcgggggagggctaacgggggcagcagatccccaagggccttgtgggccagacctattcacccactcagcaaatctttcttgattgtcaaatgtatatcaggcagtttcaggtgctgagattactgtaatgaacaagcagataaggtgtcttctacttggggagatagataataaacaaatacataaacaagaagatggaggaggcctctctagagcaggtggttgggaaaggcttctctgtgagaggacatgtgagttgaggcttaaagaatgaaaaaaaaaaatcaggtatgtgtagagttggaggaatagccattctaggcagagagaacaggtgccaagaccccgcaggtaggcatgtttgaggaacagaagagatcacttggttggatcgttgtaagtggttaggaagagcagggtgagagaagataagagaaggaatgcgggggccaagccttgtagggccatggtaagacatggtaaattttcagtacagaaataatcagatttatttctgagataattttggctgccatgtgaagaatgggctgtagggggcgagagtggaagcaggaagaccagctttaggaggtctttgcagaagttgagcaatgatggtggcctgaaataggatgggagtggcagctgtgggagccaccctgtgggaggggtcgacagatttgagacagctttaggaagtggaatggagaggtctaggtgattgaacctcgaggtgaaagggagagaggagtcaaggccaatactctgctttctaggttgaacgactaagtgtttggtaatcatttcgggtcttgaggtatgagatgtctgcaagatatcccaggggatgcaagggtgtctacacaggtctgcagcttggaagagcagtctctgtcggcaccacctttcggaatggttgcatatgcgtgataatgggaggttgaagggagagacatgaacacctgggataaaatgaggaagagctgacaccaacagagtagaccaagaaggcaaaagacaagacaagtgttcaccagatgtaatgaacatgttggtgaccttagcaaggaacctcaaaggatggtggtaagtgggaggccaagaggcacaacaagctttttagcagtttggccactataggataggggcaagggctgggagagagttctccgacaggacctgggtctgcagccctttgaggttccaggaacccagccaaggcctgcgcaggaaagggtgtcttcccttaatctcagagagtgagtcatctcagcccagcccagcctgcttcccatcagaggcctagatggtcctaggaaagtcatccttaacccttaacctttaacctgggatggagctgaaggctcaaagtgagagcgtgctccctcaactccccacgataagccctacactaggaaggcttgcatgcccagggcgaacccttgaccctagtagctcatcacctccaattccccaagaccatgtactttgggtgaaaatgcatttgttctccaacttctcagaatctttagtggtctcacaacccaaggtgaacaaatggaattgagaaaagggcaagaacagtagcacagaacaatgtgaaggtaggttgcctatggaatctttagggaagaggaagatagttctaggaagaaaaggcaaattggcttcaagcatttttatagatcaaacctgttgggtcacccctgtgaaccttcattgattccagtgaccagacagcagtcaaacctttgtttttcactttattatacaaaaaagggaaaacaaaacttccacagttggctttaagcataggcagacacctctaagccactccctcccacctcccatgatacaaattcaagttgtggtggttgttgaatcctacaaaacactccttaaatattagaaaagaagttgggggtggggatgggggtcttcccaccccagccatcccatcccagtgccaaaatgcactcaagagtgacctcttacagcaccaacacccccaccctgacagtcctgtttgtactgtaagaatttttcaatttttaaaacaggaaagaaaaagtgccccattcaaagttgtttttaaatgaaaatacattccactgaaacacaacagtgtaggggcatccaaataggaaactggggttctttgcagggctcttgggaagaaatagaacctataaacccctgtacttaattccaggattaggacaaaggaaggggaatgggagtggggagtgtcccccccaggcctccccacccccagcaccaaggtccaaggcaaagcagagactgtctgccttcctttgggagagggacccaccagcctctctgggaccagggcccttcaccgttcttgctccacctccgcggcagagttcccgctcttcccccattccttggctttcattcagagggggaaggtggaaaagcaccaagccccaatttaataggtcagtgacatgaccataaaaaagaaccccccaaatttagtcaacaaaaaaataagaactacagagataaggtggcttggcttattaagagtcaaggaatcaaggtaccaaaaaatacgggagatggctgggaagagttagagacagctgcagatgcagcttttgcagacttcttgcccagctgtggggttgggggaggagggagcagacctgagaaattaaaggaaatagggggtggtgggaggattcaaggaaggctggagggatgtgtaagttaggagctcccagcacatttcttgaagcccaggttctgagcctggggtggccaggcttggcctctcagatgaacaggggagaccttttccatcaaatacaagctttaagcttcacaccatcttgcctgcctttccgccttcctgctggacaatggagaccagcagctcggatgcatgtgactctggcagagggagcctggtctgggaagcatccgagaatggcttcagcacactccccctaatggaatcagagactgggcaaaacagaggatgtggagaacggggcagcctcagcctgctcccaccagggtcaacatctcccggccctcaccgaccctttttccagattcacaacaaactgatgtgggctctaggacagacccctttacacacacacacacacactcacactcttttgcacacatccacagctgcacccatgctatgtacaggaacacacatacacatactctcttccacatacatcaagaccatttttaaaaggttccaaatctacccctaaaccctccctctcccagaaatgacaacagagacggcagccgagatcggtaggaaacgtctcgttgacagctcagagcttaaaaaaaaatatatacacatatataaaaaacacttctgccccctcccccatgaacgggtccaggcagctccttcctgcagggggcaggggagagggccaccagggcagtgcctgttttcttgaaggcaccgaccctcctcctccccatgttccctgcctccagttccaatgcaggggtccaggtggcaggcccctctgggaaggaatgggtcttccccaagcttccaccccaccttggattgggccgcaggtgtggagggcctcatcaaactctttgggaccccccacccccactctccggtccattgtccatgccggaaccgcaagtgcagaagtgggtggggtgggccaggctggtccggtgctggcttagtctgatagttgctgtccctggaggaggacccccaagggctgatgtctctgaggctgcagagtcctggcctgggctcctccagccccctacccccaccgtatttttttttttttttaaagaaagaaagaaagtgggggaggccaggggggcaagggacagaacatgggggagaaacaaaggtggtcagttggggaggggagctcctgggctctccctggctgccctggggtggggctgagcctcagttggagtcagagtctgaggagtcccctgaggaggaggagctggagctgctgccctcggactcattatcttcatcctcatcgtcatcctcgtcgtcgtcttcgtcctcgtcatcctcttcattctggggggtgagaaaggatgtggagtcaccaggtggccctcctggcaggactcccctcccctcccactgtgccctgtctgccccacctcatccccatcctcgctctcgtcctcgctgctggactcagaggagtcgccgccatcttcagaggagtccccattctcatcatcttcctcttcttcatcctcgtcctcgtcatcctcatcctcttcatcatcctcctcggactccttggagggatggaggcacatcagtggtctctggtctctgcccaaccattccaggcagtgccccccgccccacgcccctgcatctgggaggggctccttaccgacttggactgcagagtagtccggctggatttggggtttgggcctcgcagcttggtcatgctcttacgtttctgcaggatggggacacaaaggtggcagccatgagttcgacacccctgaattcccccacccctaccccactgctgctctgctcccagactcacattggagatgtactctttatatgctgcacggtcctggggagacaggctctgggggagacagaagcggcaagggttggaacatagccaactactgctgactgagcatgctggcccagtgctaggcagtgggctgagcatttatatatcatcaccccatcttacccctcccaggctccctagattttgggtctctgcagagagcccctgggatctgagaacacagctctaattttttttttttttttttttttttttttgaaacagggtcttgctctgtcacccaggctggagtgcagtggcacaatctcagctcactgcagccttgaccttcccaggctcaagtgatccttccaactcagcctccagagtagctgggactacaggcatgtgccaccacaccatgctaccttataattttttgtagagacagcaatctcactatgttgcccaggatggtcttgaactcctggcctcaagtgatccttcataccttgggctcccaaagtgctaggattacaggcgtgagccactgcgctggcccaaaccctagtatttctgcttctgatacccagagtccttctctaaaccactaagactattggttttcacattttccctgttgcttttcgcaaatggaagctcctatcagagtcttcctcactccaaagaagtgcccccgtgatgagtcagcctggcatcatcaaccacaccccaacaccaaacccttgagccatcgatgaggcagtggggctcaccaaactcctgaaacagcaaatccccacagtcttcctgggtccttggccaacctgccttggtgagtgggaaggacacaggtgattctctccactttacagatctgactactcaaccaaagcacagaggggaagcacaaaggccaggagtctaggagaggtcccgtggtcccagatgggggaggaaaaggcagtctgatttggattcttctacttactgtgtgaccttgggcaagttacttaacctctctgagccttggtttccttatttttaaaagggtgatagtggctgcggacggtggctcaagcctgtagtcccagtgctttgggaggccgaggtgggcggatcacatgaggtcaggagttcgagaccagcctgcccatctctactaaaaatacaaaaattagccaggtgtggtggtacatgtctgtagccccagctactctggaggctgtggaaggagaatcgcttgaacctgggaggtggaggttgcagtgagccgagactacaccactgtactccagcctgggcaggagagcaagactgtctcaaaaaataaaaaaaaaaataaaaataaaagggtgatagtgaccgttatcctgaaggattgcgagggcatggaatgaaatcatgaatgagaccagccagcacaagtgggtggatgggccaggctaggatggtgctggcttagtctgatgcctctctgttccttccaagggtcccttgccctctcaccttaacccagaggtccaggtgcaccttgtactgcttttgctgctcctcggccagctttttgtagtgctccttctggctctgggagatgcgctgccagcgactgccgatctccaccatgcgctccttcagcggcaggtggttcagctccccattggacagcagctcctgggagaacttctggtaaccgttcctgggaggtgggttggtagaaggagggtcaggaccccaacaaagcagccatccagccctgaccctccccgacctccagggcagactccaacccccaggctcacatgggaggcttcttgggttctccctggaatttcatcttcttggaagaatttgtagcagctggaggtgcccgcatctcactcagctctctctggagggagaaaggtcacgctcaccccccagtcccacccccaaaatactgctgccttctgcctcatgccatcagcaccttagctggctgtctttttctgtgccagggaggaggagaaacaggtagctagtgagcaacttcctaacagctcacgtctgaggcaggcaccacagtttacaagtgctttcacaactgctcgcatcctccgagtcagcctggaggttagcaatgtcacccccaccttactgatgagagacagaggttcagagaaggaagctgagacttgctgagagtcacagaccaaggctgggacttcttgctcagagctgcccaaccaaaggggagttcccgagctttcaatgaatggggtggccccagccccattcctacctcatatcgcttttggtcttcggctgccttcttaatccacatcagtttctccttcttttccatgttattccaggtcatttccatggctttcaaggccttcacccggtcattctggggaccaataagggtatcagccgtgggaggggtcacccggggctagaggctgcagtactaccctttcccacccctgtcaccttgaagcgggccaggtagtcgccgataacgctctgttgccagatctcctcagctcttttgggggactcgggcagcttgccccgttcctcgcgctccccgccgggcttcctctccgactgagccttgagcgccgcctctcgggccttgtacttggcctgcggggatggcccgggcgtcagccttccacccacccccagggggcgcgcgctccccgcgcagcagcccaggcgctcccgccggcgggcagaagcatgggctggtgcagatgtctcccgcctggggctcgcccccgcctggtctgcggcgctcagctgacagcttcccgccttccggctgctgggcgccggccccacgtcccagcccaggcaccgcgtggctcaggcggccaggggcgaggtggcacggcccgccaaggggaagagggggccctggcagcccccctgggggcacagcgctccgccaggcagcctgaccttcttcttctcagacaggtcgttccacattcgggccagcaggcgggtcagctcgctctcggagagctcaggccgctcctcctgcagctgccgccgtttctcctccgagaagatgaacatggccgacacgggccgcttgggcttctcggagccgccctgtccaggtgcagagggtcggggtccgtgggtgctgccagggagcccagtcttgcccacccccgcctgcgcggccgcaccctctgcccaccttgcccccttcctgggctggcttcttggaggcggggctggtggcctgcttcttgttgatgttcagcatcttctcttcccccaagacccgctgctgctcctcctcaggcaggctctggacaggaaagaggagcacggggctgcatgcctggcacccagactgcatggtgccctatctccaggggctcaccagggctctgcctgccaagtcccagtcttctctgcccactgccccaccggaggaacactcacctcgaggaaacggagcagctccacctcgtaatctttctttttctgggaaagtgagtggagtcaggatcagtctggagacagtgtcaccacagaccctgcagtactcggaggacagtgaccttcagcgggcctccagagcctgggtgtgggctggactccctgcctggacgggctcagttgctaagcccagcccagccccacactgtattggaggcaggtacccaaggcacacgccaccagggactgactggcccaagatgggatcagacctcatgcttcaaaaccccaaggcagggtggcccctgccacagctcacctgatcacacttcttgtgataggcgtccttctccttctgggacagcagcttccactgctggctgcacagcaccatgcgctctgtgctgggcacgtccttcatgttggccatgagctctgcgcagtacagcgagtagctgttcctatcagagccgcggggagagaggtgcagcccgtaagcgagcagggcagcaggccttctcacctgcagagcccagcccaacttcccagctgcccactcgcccacccatcccagggcagcgctcacggaggtggcttggtgggtcgcccgtcaaacttgtccttgagctggcgttcggccttggtgagggtggacttggtgataccctcctcactgatgttcagctctgggtgcttctggatatagtctctcatgatctcctgcagagccaggtggggggacggagggcaatggggtgtggagttagctagggcaggggcagggggagagccgctggggagggcaggcagggagcaaagctgggggtggctgcgcgtcagtggtgtcacacgagacgtggtgccctgccctgccctagcctgagatctcatgggggtggggggtggggaaggtaggggcagaggtgaggggcccagaaggcccctccctcaacagagggatggggagtgacacctcccgcagagtgcggtggccacggagtcggagggcagaggctcgtgaagagccggacggggaggagcgcagcggaagcctaacctcgtactccttccgctgctccagggccttatgaatccatttcagcctctttttgtccgagagctgagaccactgcttccccagggagtccttcacctccttcgtagtggcctgcaaaccaaaagccgtcagacacgcacaggcagccaggggcagggggaggggggaagggggaagggggcacagaggcccccgccccctcaggccatgggaggtcacatcagtgtcccccacaggccaggaggggaaggcggagaggcggggatcccgcctgggtgcaaggggactggctcatacacgcacgcacacacgcacacgcttgcacgccagctggcccgggccctgtccatgcagcccacccctggggaggggcctcctctcctgctcccctgcaccgtgcccggccgacctggcgcggctcccccctggccaccgccgtgcatcctccacccccaacccttggccggacactcacatctggccgcactttgagatacaccttcttctcgtgggtgtaccacagctgctggggggttttgggcttctctgggatgtccgatttcttggcattctggattaggtcggggtgatcctccctagccaggacacggggagcaaggatcagcaggggacgctgccagggcagactcaagctagctgccccacccaccaagcctcctgggcctttcagctggggctcagtgggacggtggctgcctgcctgtctctgtccctgagcatgacacactagggctcacatgtgacccatcctcttccatgcctcagagatggcaaactcaaggctctggccagggttagcctattctgctgcccccagtgccccgtggccctcctctgggctccactgccttacctgaatcgggccaggtttcgctcgaactcctgtttctctctctggaagtcctgaatatatttcatctggggggaggaggggatggggtcactcaggacccaagggtatctcaccctgagctatgaaggccacccagacccctcctcgctggctcttctgcctcccacgctgtgatgcagggagtggaggctggcgccctgcccgcctcctggcgggactcaccacagagcagacctgctggcttctaccacagatggtgggagctgcaggggtcgcccagacactgaatcctacatcctattctctccttctgagcaagagtcccagaagggggccatggcattacccacggtcacacagtgcgcagtggcagcgctgagcctcccccactcgtttctccaacaccatagaactctcacagtggcgtcgggtgcaggccttgctcctgtcactccctcttctcactgtctgtggcagctgacattagtctgtccccttgtacgtagcctctacatctatggccagggctgggctgagtcctgtttccaaggcatgaggggagattgtgtggaggggaacccagagcgagttcttccaatacaagtctcagccagctaccctgcatcttcctgcccagttctcacaccatcaccttcttctctttctccaggatcctggctgtctggcccctccagccctccctccctcagcccactcattctttcccaccacttggcttcccttcccttcatcaccccctttttagcctccccactctcacctcactccctccctgcatctttccccacttctccatagtctccttcttgttcctcctttccaatgtgtctctttctcttcctcatcgaccttctctcttggctcccacacaatgtccatctcttctttcatcctcgcgggctcacaagagtggcactggcaggtgccaggagctcatggcaactgagcccaacccctgcctcttatagaagcaccaggcatagaaaggcagtgctcctttcccacagttcccacagaaaaccagaagcagagctcagcctcctcttcccccatctcagtcctcctcagacaaaacagttttagacctgaaggggaccacacagacctggctcacctcacataaagaccaggcccacagaagtgaaatgacttaccaaaggccccatacacagcggttcagtggcagagccaggagaacaggcccaagtcttgtgtcccccaggacagcaccttgtccactctaccagtttcttctggccttccctggctctgactctagagcttggcctctccctcccatcccatgagagtgtttgggtgtgtgcagtcaactgtccaacatcctcatcaaaggggtcaacagttccagcaatccatacccctctctgcttgggcagtggttgcagacagctggcttttttgggtacagcaccaagggcatgtgagtctgcagccagggtatgccaaccaggaaaaagggctactcatagcatggcagcggccagtgcccccttttgagaactggctgtgtatgactttgtttcctctccaagcagatgtgcttcttgtctttcctgctgcccttccccatctatccctggctctgtctccttgtcccgtgtctcttctttgtgtcctctgtccccatcccatcttcctcgtgtcccatctgcaggctcctccaatgttttgctgcctatctctgggagggacctcctgagctctgtgactgagccctgcctgggaggcttaggcaaccctccacccagagttaatgctttgatggtctgggacagtgcccgacctctgcaaggaacagtatgaggccaggagggacaatgtgtgtccttgagtgaacacgtgtgcgtggagaagtgcacttcacaggtggacgtggcagtaacagcactggactgggactctggggcactaaatcctgctctagcatcaatagttgtgtcacccgggacacttaaccctcctgcacctcagttccttgcccacaaaactgggataaccttttcctagggttacctttataaagacattgcaagtatcaaatgagaccatgacgggaaacgtcatagagggtgaagaagtgctgcggagcctaacagtgaggatgggtgtatgggggagagagagcttgaaacagaatgctgtgggttttctgtagggggaaaggttggtctgagcacctgctgtctggtttacatctgtgatggtgcctgtgcctgaccatgtgtgggccgaggaaggggcaatcaggtgtggctgcccaggacctattctgctgtgctgactcaccctcatccctgatgccaggtttctccaaggcctacctccaactgacccacaccacaccagctgctcccagcctctcccctcctcccaccttaactctcctccccccaccttcttcttctccggaagctccttgtatttcttggacagaatcttggttaggtccaggttgctcatctcagggtggagtttcgcatacttggcccgcttctccatgaagaagcggaaataaggggtcaggggcttctttgggaagtctgggtgtttctggaagaagggacaaggacacaatggaggtcaaatacatcccttctttggacctttcctcccatacccctcatgctcctcctcctagtaactcaccttgagttttttgcctttgtaaggatttttaacatgttcctgagcatcgaggatcaattctgtcaatgtacggaacttcctcacctggaggaagaggggtgggaggaaggggaagttgggaaaaggaaaatgccacacagtagtatacccccatcttataacgggtctcttctactctttactagactaaatttaccaaagaagagcagaggccaacagccaaatgaagcaggcagcatgacacccaggcactggcccatgcctaccgcagaggcccaggcagtcagtacacaccaaaggccagcaacaaggggactaactgacctcaacctggttgtccatgctaacacctccgtcaatctcagcatgctagcacctccgtcaatctcagcacagctcaggctgtttggctcaagaccactcagatagaaagtggcataactttaagccagtgctgtcaaccgtgccacctcccaaaatgcaaaggggcaggtagagagctaacgggagaccacatgaatgcctctcctggtctctttccttcctgtttacagcctgtttcacttcccccaccacgctgagtggggggtatgtgtgtatgtcagaaaagggggatcagttacctcattagaaatctccacccatttgagcttgcacatgtctccagaaaagtctttaaatgctactttttcccagtccatgtgtgattcggtggttttgaacttggagctgtcattggatggaaggttgttcttcatgcattccagcaaagtcagcatgtcttcctgggaccaacggtctggtaaagagtaacagaggccatcatgcctggctcatgctatccccccgatctgttccccagttcttgagtgctcaactcttcctccctagggcatcccagcccctggttgcttcccatctgaaggcacagacaagatatggctcagccctaaggaaactgtggccatattggatcagggcagggactccagtccagaccatgctatacctagaaagccaggctcgaactcaagtctggcttgcttcaaggctattatcatttatactgtgccaagctgcaacgggcagctatttgctgtaaggggaagaggggtggaaatgaaggtacagtgattcagggctttgtgggaaacgaggtagcttgtcagagaaggagggaagcagggaagcaatatatctaaatgtgctgccaagttcaagttctgagtggatattctaaatgtgcaacgactgagaatggggtgtggacagtaaggaaaatccatgcagatgtctctcctgcacagctggaaaccaatgttagagacacccaccaccccctagccccttaaagcagatcaagggagaatttctggcaaataagaaaaaggaaacagaagcagaagcaggatacagggcagctctgaggcaaggtaggcaggtgcacagaaactctcagggccctgctccagggagaacccccagaattacaagctgtcttgtcagcccaactacccagggaagcaagaacaggtctggaacagttatttttcagccactgaaatgcagccccagagagctctaggccactgtggatgggctgggagaatagccacccaaggccagaagtcaaaagggctctccattttcatttgcatctggtaacctgggccagagattctgcagaatgggccacgtggacccataatcccctctcccctcaatgtcccacaagcatggccagctgtccagcttcatcctactctctatccccatctagactggatcactgctgaatgaggcagagatctagttgagtacatatatcccatggcttggggcctaaaaccaccaaaacagcccttttctccacctgcctctacaaaagcctcatggtcttcctaaaaagcctgagaagccttccccaaccccttcctgacccttcctctacactcatccttcctcccattccaggacactgggctgggacacacttcaggctgaatgggaaccccagaaggcaggcctcctctaacacagagggtgagggacagggagagaggggaggtgagccactccaggccaaataatttggattcagccaaaccccaagtgtgggagatgcttgattcataaatactcaaggcactttctcccccagttcagtgtatgcagactgaaaaagcccttgaagaagggagtgagccccgcagccacgagggaaagagggtttaagtttcagagggccgggggtggatgcccctaccttggcctttgggggcggccatttccaggtctgtggggcagtcggcttctccgttcatcctccagctgtccagccacctcctcggtcgtgctggccgggcaacccggggtcaaagccacctcaccctttggaagacataccagttcccactcaggaaggctgagaggtgaacgactaacgactttctaaccgcccagagtagaagggggcaggtccacactctgagagactcagccatgaccttattagacttaaggggtctatgggaatgggagtgcgcccctcctcttcctcgtgaccccctcccccagcccctgcagcccggctccgcggcgcgcgccctcccctggccacgcgagggcctgctcctagctcccgcgtgcagcgagcgcccgccctccgccccgcttcccaaccccagccaaaaaaaaaaaaaaagaaaaaatctcctcctcctcggagcgcccgccccggggaggccccaggctggagggcgggggaagaggaagggcgggtaaagggcgcgcgcggccacggaagcgggcacgcgccccagtctcctcctcccgcctccccccggccggttccccccgcctccgcaacccggcggggacccggacgcagcgcagccgccgccagccccggagcggagcggccgcaccgcccccggggaccggatccggattcccgccgctcccccctcccgggctcccttcgccgtccccgcccgcacaggcgggcaagcagccggagagaagcggcctagcctgccccccgcccccgagccacccaccccggccagaggcgccgccaccgcccagccaccccgacgcgcacggaggagcccggcacagaggcgcgaccgcggcgggaaccgccgcctcctcccccgagcctgcggcccagccccgccggcgcccccgccccggcctccggggagccgagccaaggagagggcgggaggacggcggccgggaggcgggggcgcagcgctcaccggccccgccgccccctccggcggccggggagaactgcgcctgccggctccgagaagcgcgggctcctccgccagcggccggggctcggctcaggcctcgcttcctgccttcccctcccccggctctcggcgtcctcccaagtgccctggtctgctcgcgcccggtcgcctgctcggtggtcgcttcgggtccccgctgggcgcccaccgcaccccgcggttcgctcccgccgtccggccccgaccccagcgcgcgtcctcagccgcctcggttacccggcgcagcgcggcctccgggcttcccgctccagcggctccctccctggctctgagtggcggcgccctcccccgctcggccgggcacagccgcagctccctcccgcggcggcagcggctcctcctccgggcgaggcggcggcgctggggcggcggctgctgctgctgtggcggcggcggcggcggcggcggctgtggctgctgcctgctgctcctcgcggcgaaaagcacaaagcacagcgccctccgcctgcaggcagcccgcccgccgccggccccggcctcagctcgcacaccccccgccgccgccgcagcctcagccgccggagcggggaggaggagggagaagggaggaggaggagcgggagggggggcgggagaagcggggcagcgagcgcgtccttccccgtagagcgcacaccgacccccggggagcgagcgccagcccgcccgcctcgccggctccgctccctcccacagcctgcccgggcgggctccgcggggggcagctgggaggaggggcgggagctggggggacccgggcggccgaggcggagggaaggaaggaggggaggggggtggtggtggtggtgctggcggcggcggcggctgctgctgctgctgctgccgccgccggggaagggggggggggccggggcagggagacacgcagccgcccggatggcggcggggctcggagcctaggcgggcgggcgggcgccgagagcgacctcgccagacccgcgggggaactagcaggcttcgccggcgagggagggccgaggtgcggccgcggagagggtgcccggaggtgcccccggcgtccggggaggctcggggggcgcccacagccctgctccggagctctcccccaagttctcccagctcagactagggcttccaggccagctctctcccgcctcccggagcgagcggtccgcgcccaccctcatcccccggagcgtggccgctggtttggggcgcacgcacgccgatcgcggcgtccagcttcggtgcctacctcgcggtcctctccttgccgaacggcacatacgaaacttaaaaaaaaacccgaaaactaaaacctctgcattaaaaaaaaaaaatccccgttgctctttacaccccggaaacggcaagggaacgacgggctccggcggaggggccgctgtgggagccggttcaatccagcccggcatggttctccaggcctgcccgggcgcatgaagatcggcgccgccgccactcgtagcaacccctctcccccgaaatccgcggctcccgggctcacttaccgagcgtgtggatgggagcgcaggccgggggcacctgggagcacggcgggccgaacagtcgagccgcagctccgctgcagccgacgccggggcagcgagtcgccagacaaagcccgagatggcgaagcggagcgacggctaatggcgagccccacgcgccgcgctccgcccgccccgctccgcccgcccgcccgcccgcctcggcgcagcgcagcgccgctccgagcgcttgcccgtcagagccgcctcggcgccgccgcctcccgggccaccccggcctcgcctggcccctccgcctcctccgggcggctcagcctcaccccttccctcccactgctctaggggttgcacaaaaaaaattttttttttttaaagaaaaatggttttcgtcttttttttttctttttgcagggcgggcatgttgagacttttggatatttctgcccccagctcgcactcacctgcggagccgccgggagggctaggggtgggggcgcgcggggctggagccggcgagcgcgggttgaaagccagccaagctctgcagcgcccgacccgggcgtgtacgccgccgccagtccccgcagagaaatcgtcctcctaccccgcctccatcgctctgcgtttctcttccaatcagccggtcgcttggtggctcctccattctccggccaagcccagctgcctagagcgagctccactcctccatctgttcgccggggtcctcgctcccctgccggggccggcgagacggcgtgaggccggagggggatttgcaaggaaacctgcctgcttcccgctcccattgctccatccccgctgcctcctgcctcctgcttctctcctgcgtctttccaactctcccctgtcgccactggtgtgtgtctgagtgtgtgcgcggttttttttttttaattgctctttgcttttgcaaccctgaagcaaaagggggggggggtagttacagggaaaaaaaaagcgagaaagaagctcttagatttgcaacacatcggaaaaccgggggagcaccccgccttatccgatctccatgctccgcaagggccttccgggttttaggacaagcttctcaatgtcccgtttcgctgggtttaggatccgaggagtccgagcaaaaagttctccccctgggtcgtagtgacgggtgtcggggtgggagttgcggggatttttcaagaagcagcagctaccccggcgtcggtcactgggccggggtaggggaaagagcaaaatcccagtgggtttgcgcgagggatcttctagggtcgaggcgggtgtggggggagttggaaccgggagacaccgcttggcgcatctctccctcggtctctacctcctgtcctatgccagctccccctttaatttttttcctctcctttaatctaatttcttccaactccacctttgttgttaccggcgtcacacccggaccagccaatccccgccacgcaatcagcttgtcaaaaagcctcggccatccctaggaaagcaggccgcaggcgctgccccccggcggcggcgggcagccgcgaggggagcccagcacccggttctcgctgccccgggtggcagcggggcagcctccgacaagacgtcccttggttcactgtcctgcaggccggggatgaaaggcctggacagggtccaccacccactctcccactgccacggccgtggttgactgtctttgcctccccttttcagaggaaaggttatcaggacaggacgcagggagccagaagaccatctgaaggaagcctgcttccaacgggcccagcctccagccaccgctcctggggcagcgccattgctcctggctctcaggctgccagtctcccacaccgacgctctactgcccgcatctcggccagctgggtcacccagcccctttcgactctcccctggcacgcagccttctccttcactcggcctgcctcgctgctgctgtaattcctcttgtctcctgggagaaatgagattgctttcccaggacttccacatcccacttctatcaggtttcaccaacagggaggaagccctgtcaagatctggtgtgtcctgttttttttttttttttttcccagagggcactggcatgtaggagaagcggatttaccactagtagatgttaatgaaatttcagcttctaggcccctaacttgcaggacctgcccaaggccctgaacttaattttgttttcatcatttggtatttttttgttaaaagagccaccgaccacctccccgctaccccagaactgcacgtgtttctggccctacaaacccagatcgtcccttggaatatacacagggcaatttgtgtaggatcacactgcgctaaaagtgaggcatggtgggctaggcgcactggctcacacctgtaatcccagcactttgggagaccaagacaggaggtcttaagtgattaagcccaggagttcgagatcagcttagacaacatagcaagatgctgcctctacaaacacacacaccccctattataatatgtcaaaaaaaaaaaaaaaaaaaggaaaagtgaggcatagaactgactttattgttttgactaggaaagagcaaagggtttggaatcaaaagtcccaacttccccaccttcttaatagtgtgtgaatctgagtgccttattaaccttccctggtcccagtttcgtatctgtaaagttagaatagcaatcctgtttaatttgcttctctcaccagggatcagaaggccaaatgagatgatgtatgtaaaattgtaaagtcctccacagatggcacttgccacattacagagaacttgagacccccccccaccaataacgttccaaatcttccacatgcagatctggagtccaggtgtcctggctcctggccctgaactttttggctgggccaaggggcttttcggtaaagtgctttggaataaaacaggatgaacatgaatcataagaatgagtatttattgattccttgggcagcaaaaactatggctggcacccttcccacttggaaacgaattggcttgttttacatctatttcgtctgtggtgaggtcaggagtccaagacttgggctaacggccagagtatgaggaatctgcccttggccctttttctttgccccatttcccagttcatctccctcctcaccctccagccttctggcatgtgccttgaagcagagcgctggcattcaataaccccagcccaggctggtgacaaagcgggatcctagctacacaatttccacttggcctcagtatttccccaggttgccagcatccaagcaccagcttatataaaacccccagagtgcctggaatgcgttaaccaaagtgtggtacttaaattaccagtctacagggagtaattttagatggtataccaatattttcagatttatgtattttaatgcatattggaaatgttctgtttttaaatttttatttaagatggtataaagacacacgtttttgggccaagaatgttattgtcccttgttactttttttttttttttccttgggacggagtttcactcttattgaccaggctggagtgcaatggcgcgatcttggctcaccgcaacctccacctcctgggttcaagcgattctcctgcctcagcctcccaagtagctgggattacaggcatgcaccaccacgcccagctaattttgtaattttagtagagatggggtttctccacgttggtcaggctggtctcgaactcccaacctcaggtgatccgcccaccttggcctcccaaagtgctgagattacaggcgtgagccactgcgcccggcctgtcccttgttatttttttattgctgtgtaagtcagagatagtaaagtacacatactttaagtatacaacttttttttttgagacggagctttgctcttgtcacccagactggagtgcaatggcacgatcttggctcactgcaacctccacctccctggttcaagcaattctgcctcagcctcccgagtagctgggattacaggcatgcgccaccacgaccagctaatttttttgtatttttatttatttattttttgagattgagtctagctctgttgcccaggctggagtgcagtggcacgatttcagctcactgcaacctccgcctccaggtttcaggcgattctcctgcctcagcctcctgagtagctgggattacaagcgcccacgacaatgcccagctaatttttgtattttcaataaagacggggtttcgccatgttggccaggctggtcgcgaactcctcacctcaggtgatctgcctgcgtcagcctcctaaagtgctgattacaggcaggagccacccaacccagcataagtatacagcttgatgaacttttaggtatgtatatttagtatcatattacatatgtgtataccatgtaaccagcacccagatcaaaatatcaaatatttctagcatttagcaagttttttttttttttttttttttttgaggtggagtctcactctgtcacctaggctggagtgcagtgacacggtcttggctcactgccagctctgcctcccgggttcgtgtcattctcctgcctcagcctcctgagtagctgggactacaggtgcccgccaccatgcccggctaattttttttttaattttaatttttagtagagacggggtttcaccgtgttagccaggatggtctcgatctcctgacctcgtgatccacctgcctcagtctcccaaagtgctgggattacaggcgtgaaccaccgcacctggcgcatttagcaggtttactcagtattcccctccaagtatcatcaatgttctgaggttctgagctctatcaccatagacaagttttacctgttcttgtagtatttccattgtataaatataccacaatttatccattctacatttatttatttattttaaggtgaagtcttgctatgttgccctagctggtcttgaactcttgaactcctgtttttttttttgttttttgttttgtttttttgagacggagtttcactcttgttgcccaggctggagtgtaatggcacgatctcggctcactgcaacctctgcctcccgggttcaagtgatttccgcctcagcctcccgagtagctgggattacaggcatgagccaccacacttggctaattttgtatttttagtagagacggggtttctccatgttggtcaggctggtctcgaactcccgacctcaggtgatccgcccacctcagcctctcaaagtgctgggattacaggcttgagccactgtgcccagtcttgtttttttcttgagacagagtcttgctctgtcacccaagctggagtacagtggtgtgaactcggctcactgcaacctctgcctcccaggctcaagcgcttctcgtgcctcagcctcccaagtagctgggactacaggcctgcaccactactcctggccacctttttgtatttttagtagagactgggtttcaccatgttgcccaggctggtcttgaactcctgacctcaaatgatctacctaccttggcctcccaaaatgctgcctccatctcccaaactgctaggattacaggtgtgagccaccgcacctggccataagttcaaattaattaaaattaaataaaatggaaaattcagttcctcagtcacatttaccatatatccatggccctatgtgtctagtggctacattattggatactagagatatagaacatttcctaggctggcgcggtggttcacgcctgtaatcccagcactttgggaggccgaggtgggtggatcacctgagatcaggagttcgagatcagcctggccaacatggtgaaaccctatctgtactaaaaatacaaaaattagcctggcgtggtggcaagcacctgtaatctcagttactcggcaggctgaggcaagagaatcacttgaacctgggaggcggagcttgcagtgagcggagatcccaccactgtactctagcctgggtgacagagcaagactcttctcaaaaaaaaaaaaaaaaaagaaaacaatagagtgtggtgatttggggtacatggtgtgaggggatggcaggatatgaaggaaagggcaattgagtagagctcttagaggtaaaactcacaaaaatatagggccccatctgacctagtccacctgcaatttttattttttatttatttattttttatgtttagaagaaatacggactttaatgaagagttttccttttgctacaagtgagacccggggaaacatcccaacaacgacaaaaggaggccaggatggaaacagcccactctctcttatccacaaggcctaaagagaaagcccggcttgctgtcgtgtgtccactccgggcctaggcagggctgcgcctgtaaaaggtactcaggaactgcaggttttgcatttcccctttgtgaaactaacatgcatttgggcaaacttctgcctcccagtctcgtggtaagaggcccaagtttttctagtcctaggtggaaatcagtttcatctgcctcaggtctctggtataaataataatgctgctgatcccagttacctcacaggcctgggcaacgaaaatgccaagagctgcaaaaggtcttggaaaattcaaaaaggtgatgtataaatttaataattgattatcattttgtgctcaagaataagccatggaaaacaaaattaggaaagtaagtctatatccctaaaatatatgcatataaaattttaaaagaatgcagttccaactctgcagatagtattcagggatggtctactgctttagagtctcaatgccccttttcccacctccacaaaatccacctgggagagtttactgtacacgaagcccaaattcagtcaccccccacccctcctctcccagaaagggaggcagggcagaggctccaggaggaagggctacattttggctatagagtacaataggcatgcatcatgggagggcagggtttatgaaatggattgaggggctctggccaggaggcactgagcaagggacaggtccatcttccccctggctgggaggggggctctgggacaatctctaagggttgcatatccccagggagaggggatatatgccattcttgtctctattctcccaacccaaaccagagagggtgctgagcaaggagaaaacagggtctcagaagccaagaaggtgtcggcatcactgtcattgaattcagggacccatgaactctttttttttttttttttgagatggaatctcactctgtcgtccaggcgggagtgtagtggtacaatcttggctcactgcaacctccacctcccgggttcaagcgattctcctgcctcagcctccttagtaactaggattataggtgcatgccactacacccagctaattttgtacttttagtagagacgggttttcgccatgttggccagactggtcttgaactcctgacctcaagtgatccatccgcctcggcctcccaaagtgctgggattacaggtgtgagccaccacatctggcacgaactctttgcataaaatatcttcagacctaggaggtggtcaaaggcacaaagtttaaacatggggtgggggttgtggagaggtgtctggggtaccctgaagctcagaggtgtgatttgttcccccttgcccagaagggtgactgctccactgggcctatcaccacaggacattttccatgacaagcactcaccttcttggggaagggacatcgggttggcacaggaaaggcgtaggtaaggggccactctgtccattaatacttcgggtgattaatgtttggggagaagcaagattctcccccaggcttctgactcaaactctctcacttagctggatactaaacccagtgtccacactaccctcagctctgacacaaggccaaacccacagaacactcccaaatgaggtcccgagagttagggaatagggtggaatcttctggaagagggcgctggggcagatcacagtttccacttcacaggttgctgtagatacagttcactgcccacagagatgataggccagtgattgtccatgtggtagctgatgaggtgactgacactctctttttttttttgagacggagtctcgctctgttgcccaggctggagtacagtggcgtgatctcggctcactgcaagctccgcctcctgggttcacactattctcctgcctcagcctcctgagtagggactacgggcgcctgccaccacgcccagctaattttttgtatttttagtagagaccgggtttcaccgtattagccaggatggtctcgatctcctgaccttgtgatctgcctggcttggtctcccaaagtgctgggattgacactctcaaagcagtgatcctttgtccaaaccagtccttcagggtccaccaatagcaggtgcttaggcagcccactctgcaagccagtaagcacatactggccttggtcatgctctcccgcaccaggaagtcgccatggagctgcagcaatgcctcagcctctcgctggctcagcttcccgtggaaccagggctccccttggagctgctcagccatggaaaccactggggagggggaggcacccaaagagcatctttaaagggcttcatgtcaaagaggtcccagggtgcactgcgattgatggcaggatgggggggcctagcaccaccttctgcttgccgggccttgtctaggttctggacgttgatatagggatcattgaagagctctctgcctgctggacagggtggtggaggtggcatctgtttgcggacttctggatctcccccagcaggctatcccacaggcagtgtagctcccaagtggctgggggtccagacactgggtggagtgggtcaagcagcctctgaagtggctccttcccgaagcctcatgtctaccaactccccaagagaaggttccttcccagggacgtcattatagtactaatggtcaggtggctcttcctcctcctcatcccaagctgatccatcaaagccagccatcctgtcttgggggtgagcagttggggtgggttcgtgaggtattgtttgaagcacaactcgaaggcctggccaatggtgctaatgacatcctgggagggcctttgggacactccagaatgtggcaggctctctgattcacagggtctttggcaacgtaggcaacatcctcagctgtgtcctgtttgcagtctgcggccatgaggttgaggctgctggtggagacggtgagagtgattggcattccagcaaatttcaggttactccttcccaggatagagctgagcaggcagctacagggctttctcttccttgtcacccccttcacacccagcacagcatcacacaccagactgatggcctgcctccctgcgtgacctgagttgggtgttgaagtcgagggcacgcattgattgcaggacctccatatagcccatggaagtgagcctgggccattagcatcctctgctacaacagctgtggattggagctagcaaagtgaggacaggaaggaagtggtcccagcggacatagagcagggccaagaggaagagcaaagcagggcctcatggagtctccgcaccgcaccacaggccgatttgattccagatcacaccactgcctgcttaggtcaccactccaactttctcccctggctctgcctccctagagaaactttattacgctcacttcccgcctcactaacccctgaccctctccccctgcagtttttaactttctgagttgctcacattgagcctacagcaatttgtcaattacacttcaggtttttctaccctggcactggttcctgtggaggttactgcttgtgagtttctgctcccatcaactgtgattctcaggctgggcgtggtggcttatgcctgtaatcccagcactttgggaggctgaggcaggagtattgcttgagcccagtagttcaagaccagcctggacaacatagggagaccccatctctaccaaaaattgaaaaattagctgggtgtggtggctcgtgcttgtagtcccaactattagagaggctgagatggaagaatcgcttgagcccaggtatttgaggctgcagtgagctatcattttgccactgtacgccagacagagcaagagcctgtcgaagaaaaaaagaaattgtgattttatctgactgtctcaccaatttagggcatagcaatttgctgtgtgaccccacttctctgatggatctaagaagggttgatttttcagtttgttcagctttttacttgtttgaatgtagaggtgatttccaagctctttacatgttagactggaaactcttcttcctgttttttttttttttttttttaagagatgaagtcttgctatgttgcccaggctgatcttgaacccctgggcttataatcccaactccaaagtgttgggattataggcgtgagccaccttgcccagttgaaatcctctatttcgttttgagtgaatttggctgtttgtgtctttcactctgtttaaaaaactatatatgggttgggtgtggtagcgcatgcctataatcccagcactttggaaggccaaagcaacgggattgcttgagcccaggagtttgagaccagtctgggcaacatagcaagaccctctctctacaaaaaaatacaaaaattagccgggtatagtgccctcatgcctgtgatcccagctactcaggaggctgaggcaggaggatcactggaacccaggaggttgaggctgcagtgagccatgattgctccactgcactccagcgtggatgacagagtgagaccctgtctcaaaagaaaagaaaaaagaaaaaaaattcccacacagcacagatgataggattttttttatcctgacgtataggaactttattttacttttaaatttatttaattaattattattattattttttgaggtggagttttgctcttgttgcccaggctggagtgtagtagcgcgatctcagctcattgcaacctctgcctcccaggctcaagcaattctcctgcctcagcctcccaagtagctgggcgcaccaccacggccagctaatttttgtagttttagtagaaacagggtctcaccatgttggccaggctggtctcaaactcctggcctcaagcgatccgcctgcctcagcctcccaaagtgctgggattacaggagtgagccaccgcgccctgccaataggaattttaccatttcgtttaagttgtcaaatgtatgggtatttatgtttgtagtattcctttgttattcttttaatgtttttagggtctgtagtgatgtcttccatttctgttatttataatttgtgtctcttctctgtttttcttggtcagtctgaccaaaggtttataaattttactcattttttttcagagaactagcttttcgtttcattgatttcctctactgtttgttcttaatttcattgatttttttttttttttttgagtgactcactcagttacccaggctggagtgcagtggtgctatctcggctcactgcaaactctgtctctcaggttcaagcggctgtgccatctcagcctcccgagtagccaggacgataggtgtgcaccaccatgcccggctaatttttgtatttttattagagatggggtttcaccatgttggccgggctggtctcgaactcctgacctcaagtgacccacctgtcttggcctcccaaagtgctgggattacagacctgagccaccaagcctggccaatttcattgatttctattctatctttattatttccttccttttgtctgctttgggtttaatttgctcattttttctagtttcttatagcaggagtttaggttattgatttgagatatttcttattttctttttctttctttctttctttctttctttttttttttttttttttgagatggagtctcactctgttgacctcaaatgatccgcctgccttagcctcccaaagtgctgagattacaggcgtgagcctgctcgcctggcctcttattttttaatctaggtatttaatgctctgtttccccctaagcactacttcattgcatctcacaaattttgatatgttttcatcctcctttagttcaaaatatttctcaatttcacttatgactttagctttggtctatgggttatttagaagtgcattgttttactttccaaatacttagggatttgtggcctggcgctgtggctcatgcctgtaatcccaacactttgggaggccaaggcgagcagatcatttgaggtcaggagtttgagagcagcctggccaacatggtaaaaccccgttgtctctattaaaaatacaaaaattagctggtcatagtggcacacacctgtaatcccagctacttgggaggctgaggcaggagaattgcttgaacccgggaggcggaggttgcagtgagccgagatcgcgccactgtactccagcctgggcgacagagagagactctatctcaaaacaaacagaaacaaatatttagggatttgctagatgtctttctgttattgatttataatttaataatgttatgaacataggctatgttttctgtgatttccattcctttaaatttgttaaggtttgtgtttgtggcccagaatgttgtctattttaaggtgaatgatccatgggcatttgaaaagaatatgtattctgctgtagttgggtggagtgtaccctaaagataaattaggtcaagttggttgctggtgctatttaggtgttctatatccttcatgattttctgtccactagttctatcaattattgagagagtagtggtagttcctgccataatggtagatttatctgtttctcctttcagttccattagttttaacttcatgtattttgaagttttgtttaaaaaattatataagggccagatggaatgactcatgcctataatcccagcactctgggaggtcgaggtgggaggatcgcttgggcccaggagtttgagaccagcctacgcaacataggaagaccttgtctctacaaaattttattttttaattggctgggtgtggtggtgggtgcctgtcgtcctagctactccagaggctgaggtaggaggattactggagcctggggggttgaggctgcagtgagccatgattgagccactgtactccagcctaggcgacagagcgggacgctgtctaaaatttaaaaaaaataaaatgcacacacatatatagacatgctctattttaaaatatatgtaaggtaggcttggcgcagtggctcacgcctgtaatcccagcactttgggagcctgagatgggtgaaatcacttgagtccaagagttcgagaccagcctgggcaacatgatgaaaccctacctctaccaaaaatacaaaaaattagctggatgtactgaaacatgcctgtagtcccagctactagggaggctgaggtgggaaaatcacttgagcccaggaggtggaggttgcagtgagccaagatcgtgccactgcactccagcctgggagacagagcgagaccctgtctcaaaaaaaaaaaaaaaaaaggaaaaatatatatgtaaattagtgttcacatataataaatctggaggaatatactctaaattattaacagtcattactggaggtttttttgttttttgttttgtgtttttagaaacagcctcccactctgtcttactctgctggagagcagtggtaccatcatagctcactgcagcctcaaagtcctgggctcaagtgatcctcccaccttagcctctcgagtagctgggactacaggtgaacaccaccacacctggctaatttttaaatttttagtagacacaaagtctcaccatgttgcccaggctggtcttgaactcctgacctcaagtgatcctcctgcctcggcctcccaaactgctgggattacaggcatgcgccaccacacttggccaaattactggagatttttattctgtatgttaaatcattctgtaatttaagtgttttatacatgtattatttttgaaatctgaaaatacaaagatatgttttaatggaagtagagagatgatttgatgtgtgtgagtgtgcatgtgtcccccagcctgaaaagcattttctggtccatcttgggaaaaagtcagctgagcactcctgctgggccctcaggccataacccacacctcctgcttctgcttcctcacccagcccttccttccttacctcctgtcagctggctctgggcccaggtacatgggaaagaaaaccttctgaggtcaccatgtggtctgccaacccagcaggctttccatgatgtcacttcactttgctgagcaaatttcacccatttctcttcaggctacttctcagatatattccatttcatagactctattccttcaagatattccacctctctcatcactgggacagttactgcttgtccctcaggagtcagatcaaatgtctctccctccaagaagccctgccttactccagctccctctgctcctgccactccctgcacaatactagtgttttcttttgttttgtttttgagacaaggtctcactctgtcacccaggctggagtgcagtggcgcgatcacggctcactgaagccttgacctcctgggctcaagtgatcctcccactgcagcctctggaatactgagactataggcgcttgccaccacgcctggccacaatttttttttttttttgagacagggttttgccacattgcccaggctggtctcaaactcctgggctcaaggcatctgcccacctcagcccctcccaaggtgctgggattacaggcgtgagcaccatggccagccagtgctcactcttgctgaacgtcgggccccatgctgactgcaggtcctatgatagcatgggctatgtcagcccgcctctgctactgactcactgacatgcacagattcccagtttgcctccttacagcgaattcctcctgtatgaattcacttccaggtgaatcactttaatcatgtcacttcccagcccaagaacctgcaagactccctaatgcctcctgaatcaagtccaaacccttctgggcagttagggttcttcaaacttgaccttgctttttccatcttatatgaacctcttctagaaggactcacctctgcagtcaagacttccctgtgctgtcgatacaccattcccacctccctgcccttggccaaaccactcccctacctacctggaaggtaccccaccctccattctccctgacccttgagaacaaattgaattcctttctttttgagacggagttttgctcttgtcgcccaggctggagcgcactggcaccatctcatctcggctcactgcaacctccacctcccgggttcaagcaattgtcctgcctcagcctcccaagtagctgggattacaggtgcacgcccccacacccggctattttttgtatatttagtagagacagggtttcaccatgttggccagactggtctcaaactcctgacctcaggtgatccgcccacctcagcctcccaaagtgctgggattacagatgtgagccaccgtgcatgcccccaacttgaattctatccagtgtccaaagtctagttcctcttctccacaagcattctgtctctggacttcataagcttgatggcatagaggtgtagaaggacaccaggctcttggtcaaacagccgtgcatctgaatcctaccctgcctcttagaagccgtatgagctagggtgagttccttatcttctctgtgcttcagtttccttatcagtaagatggggctaaagccgacctcacagggttattgtgaggaggaaaagagtaagaacacggaaagcacctggaactgtgcctagcacatagtatgtgctcaataaatactgaaagctacttcttcagcccattctgctctctgccctctcaatttccacagctcatgtccctgcagcctgccagccctgggtcacatcctgtcacacagccctagaactgttccatatggtcagcaaaactgagaacccagacccctcatatacaaagagacagaaacaaacctctcaaatatgacacaccttgttagcagtgatcagaggagaaaagggtttattacccagtcccggagtgacaccatcccccacccaacaactctcaacaacttgatagggcccaaagagggaaggggcctagaagactgagagcaaaagagaaaggtgaggctggccaggcacagtggctcatgcctgtaatcccagcactttgggaggtccaggcgggcagatcacctgaggtcaggagtttgccagcctggccaacatggtgaaactgtatctctactaaaaatacgagaattaaactggcatggtggcgggcgcctgtattcccagctacttgggaggctgaggtaggagaatcgcttgaacccggaaggtggaggttgcggtgagccgagaccctgccaccatgctgttgcactccagcctgggtgacaagagccaaactccatctcaaaaaaaaaaacaaaaaaaacgagaaaggtgagacctttaagagatgataggagcccctctccctctccctctccctctccctcctctccctctccctctctttccacggtctccctctcatgccgagccgaagctggactgtgctgctgccatctcggctcactgcaacctccctgcctgattctcctgcctcagcctgccgagtgcctgcgatcgcaggcgcgcgccgccacgcctgacgggttttcgtatttttttggtggagacggggtttcgctgtgttggccgggctggtctccagctcctaaccgcgagtgatccgccagcctcggcctcccgaggtgccgggattgcagacggagtctcgttaactcagtgctcaacggtgcccaggctggagtgcagtggcgtgatctcggctacaacctccacctcccagccgcctgccttggccccccaaagtgccgagattgcagcctctgcccggccgctaccccgtctgggaagtgaggagcgtctctgcctggccgcgcatagtctgggatgtgaggagcccctctgcctggctgcccagtctggaaagtgaggagagtctcttcccggccaccatcccatctaggaagtgaggagcgtctctgcccggccgcccatcctctgagatgtggggagcgcctctgccccgccgccccgtctgggatgtgaggagcacctcggcccggccgcgaccccgtctgggaggtgaggagcgtctctgcccggccaccccgtctgagaagtgaggagaccctccacctggcaactgccccatctgagaagtgaggagctcctccgcccggctgccaccccgtctgggaagtgaggagcgtctccgcccggcagccaccccgtccggaagggaggtgggggtcagcccccgccaggccagccgccccgtccgggagggaggtggggggtcagccccccacccggccagccaccccgtccgggaggtgagggcgcctctgcccggccgcccctactgggaagtgaggagcccctctgctcggccagccgccccatccgggagggaggtgggggagtcagccccccgcccggccagccgccccgtccgggagggaggtgggggggtcagccccccgcccggccagccgccccgtccgggagggaggtgggggggtcagccccccgcccagccagccgccccgtccgggaggtgaggggcgcctctgcccggccgcccctactgggaagcgaggagcccctctgcccggccagccgccccgtccgggagggaggtgaggggatcagccccccgcccagccagccgccctgtctgggaggtgaggggcgcctctgcccggccgcccctactgggaagtgaggagcccctctgcccggccagccgccacgtccgggagggaggtgggggggggtcagcccccccgcctggccagccgccccgtccgggagggaggtgggggggtcagccccccgcccggccagccaccccgtccgggagggaggtgggggggtcagccccccgcccggccagccgccccgtctgggagggaggtgggggggtcagccccccgccaggcgagacgcctcgtccgggagggaggtggggggtcagccccctgcccggccagccgccccgtccgggaggtgaggggcgcctctgcccggccgcccctactgggaagtgaggagcccctctgcccggccaccaccccgtctgggaggtgtacccaacagctcattgagaacgggccatgatgacaatggcggttttgtggaatagaaaagggggaaaggtggggaaaagattgagaaatcggatagttgctgtgtctgtgtagaaagaagtagacatgggagacttttcattttgttctgtactaagaaaaattcttctgccttgggatcctgttgatctatgaccttacccccaaccctgtgctctctgaaacatgtgctgtgtccactcagggttaaatggattaagggcggtgcaagatgtgctttgttaaacagatgcttgaaggcagcatgctcgttaagagtcatcaccactccctaatctcaagtacccagggacacacacactctgcctaggaaaaccagagacctttgttcacttgtttatctgctgaccttccctccactattgtcctatgaccctgccaaatccccctctgcgagaaacacccaagaatgatcaataaaaaataaataaataaataaataaataaataaataaaaagagatgataggagccgggtgtggtggctcacggctataatcccagcactttgggaggccgaggcaggcggatcacaaggtcaggagttccaggccagcctggccaatatggtgaaaccccgtctctactaaaaatacaaaaattagctgggcgtggtggtgggcacctgtagtcccagctactcaggaggctgaagcaggagaattgcttgaacccaggaggcggagattgcagtgagctgagatagcgccactgcactccagcctgggcgacagagcgagagatgatagggatcttgagggccgccctcatgaatggattaattcattcataattaatggttagaggggaactgatagctttataagaagataaacctgaattagcatgttagcaagcgcagtcccctgaccatgtgatgtgatgccctgcatggccacagggcaccacagagagtttccaagttccaggctctgcctctctccaacaaagaggagtggggttcctatccctggttcttactcttcaagacctctcccaagtttccaaccccaccctggcctcaacattggacttagggtgcagtcttcccataaactgctaggaacaggggggtcgggtgtaggtgggaggaggaaagaaatgctcaacctaaagtctctgcttctgggatcttccactcagctgggagagattagacgtgcataagcaacaaaaatgaaaatagacagtgctgcacaactttaagaataaatataggcctgcctggtggctcactcctgtagttccagaactttgggaggctgaggtaggaggatcgcttgagctcaggagtttgagatctgcctgggcaacatggtgagactccatctctataaaaaatacaaaatttagccaggcgtggtggtgtgtgcctatagtcccagctactcaggaggctgaagtgggaggatccctttagcgtgggaggtagaggttgcaatgagccgagatcacaccattgcattccggcctgggcaagagagcgacagagtgagatactttcaaaaaaaaagaataaatataaacctagggcttgggagaccagtagtgggagccctcatggacataaaggataaaggaagaggtagcattccagcctcagcctttggacttgttagggtagatggtctttctcattaaaataagaccaggcacggtggctcatgcctgtaatcccagcactttgggaggccagggtgggtggatcacttgaggtcaggtgttcgtgaccagcctggccaacatggtgaaagcctgtctctactaaaaaaaaatacaaaaattagccgggtatggtggcggtcgcctgtagtcccagctacttgggaggctgaagcatgagaattgcttgaacctgggaaatggaggttgcagtgagctgagatcgcacctctgcactccagtctgggcgacagagcgaaactgttaaaaaaaaaaaaaaaaaaagatgtgccaacaacattaaaaacattcaagcaatctcaattaaatttccaattgaattttttggaagactacaataagcgtaagaataaggccctcattatagctaaattatctttatgaaaaagagaggcgtttggttggagacattttagtctgctttgaatatccctggcttcttcccgttttggggcctctttgaagttaggcagggccacatgactagttctggtcaatgggctgtaagcacagtgactttgtcattgcccagctcaggcatttaagagcttgtgtgaatcctccagccctttcttcttctgccaaagtgacctggaagtcatatatttcagtttcgccacagatataatcagcttggattcatgaaccccgcatgaaggaagctgccacggagaaatgcagtggatcttgtgtaagtgggagataaagattcatggattaagccactgagatttggggttattgccacaagataatctactctatcctaatacaaggaggacttggtctaccagatattaaggcattctctaaaactttaataataaagagccgtgaaatagtctgaagaaacacaatggagaagacagagacaggactccatatatgagatctttttttttttgagaaggagttttgctcttgttgcccaggctggagtgcaatggtgtgatcttggctcactgcaacctctgcctcccgggttcaagtgattctcctgcctcagcctcctgagtagctgggactacaggtgcccgccatcacacccagctaatttttgtatttttagtagagacggggtttcaccatattgaccaggctggtctcgagttcctgacctcgtgatccgcccgcctcggcctcccaaagtggtggaattacaggcgtgagccaccgcgaccggagagatgtagggcttttttttttttttttttttttttggtgggggagggagtttcgctcttgttgcccaggctggagtgcagtggcgctatcttggctcaccgcaacctccgcctccccggttcaagcgattctcctgcctcagcctcccgaataactgggattacaggcatgcaccaccacgcccagctaattatatatatatattttgtttgtctgtttgtttgtttgttttgagacagagtctcgctctgtcacccaggctgtagtgcagtggcacgatctcggctcactgaaagctctgcctcctgggttcacgccattctcttgcctcagcctcccgagtagctgggactacaggcgcctgccaccacgccccctaccaccacgccccgctaattttttgtatttttagtagagacggggtttcaccgtgttagccaggatggtctcaatctcctgacgtcgtgatccgcctgccttggcctcccaaagtgctgggattacaggcgtgagccactgcgcctggcctaattttgtatttttagtagatacggggtttctccatgtcggtcaggctggtcttgaacttccgacctcaggtgatctgcccacctcggcctcccaaagttctggattacaggcatgagccattgccccagccaagaggtagggctcttaagagatgattgggtcatgaaggctctgccttcatgaatggactgatccattcatggattaatgaattaatggattaatggattagtgagttatcatgggaggggaactggtggctttgtcaaaaaagaaaggccaggcgtggtggctcatgcctgtaatccccagcactttgggaggccaaggtgggaggatcgcttgagccaaggagttggagagcagcctgggcaacatggcaagaccctatctttacaaaaaaattttagttgggcatggtggcacgtgcctgtggtcccagctaccagggaggctgaggcgggaggatcccttgagcctgggaggtgaaggctgcgatgagctgtgattgtgccactgtactccagcctgggtgagagtgagatcccatctcaaaaaaaaaaaaaaaaaaaaaaaaaaaaaagaaaagaaaaagaaacgaaaaaaaaaaagaggaaccaacagatcaagatctagaacataatgctgattatgtatagaaatacacacacgtgacaaaccaagtgtaaaggtacattttgagacaatttagatatgttggttatggattagatatgagatgatatgaaggtattactgctaattttgttgggtgtgatagcattgtggttaggttcaatgatgggggcatgcatagctaaagaatataggggtgaggccgggtgcggtggctaatgcctgtaatccagcccttcgggaggccgaggtgggtggatcacaaggtcaggagatcgagaccatcctggctaacacggtgaaaccctgtctctactaaaaatacaaaaaattagctgggcgtggtggtgagcgcctgtagtcccagctactcgggaggctgaggcaggagaatggtgtgaacctgggaggcagagcttgcagtgagccaagatcatgccactgtactccagcctgggcaacagagcgagactgtctccaaaaaaaaaaaaaaaaaaaaaaaaaaacaatataggggtgaaatggcatcaagtatgggatttaaagtatttcagcaaaggataaaaagaggaagataaagcaaatgtattattttcggcaaagatttaagcaagatttcaaggcgtaattttgataatttttgtttttattttatcattattattattattattatttttgacagagtctcactctgtcgcccaggatggagtgcagtggtgccatcttggctcacttgcctcctgggttcaagggattctcctgcctcagcctcccgagtagctgggattacgggcacatgcaaccacacccaactaattttttttttttttttttgagacagagtcttgctctgtcgcccaggccagagtgcaatggcacgatctcggctcactgcaacctctgactcccgggttcaagcgattctcctgcctcagcctcccgagtagctgggactacaggcacgtgccaccacacccagctaatttttgtatttttagtagaggtggggtttcaccatgctggccagatggtcttgatctcttgaccttgtgatccgcctgcctcggcctcccaaagtgctgggattacaggcgtgagccaccgtgccccgcctaatttttgtgttttttagtagagacggggttttgccagtttggccaggctggtcttgaattcctgacctcaagtgatcctcccgcctcagcctcccaaagtgctgggattacagtgtgagccaccgcgcccgacctattttagtattattttttaagagaataagtttggctctgttgtccaggctggcatgcagtggcatgatcttagccttgaactcctgggctcaagcgatcctcccccctcaacctcccacagtgctgggattacagacattagccaccatgcccagctgataatttctgaatttgacaaatgagtatattgggattcattctctacttttgtgtataaaaattttcataataaaatttaaaacaacaacagtgacacatattttcaagaacccattcatataaaaagaaacaaattaaacaagttagaatggttgctgtggagggggaagaacataggagtagggaatgaagacaaaagagaaggagcaggccgggtgtggtggctcactcctgtaatccaggcactttgggagaacgaggcaggaggatcacttgaggtaagtcaggagttcgagaccagcctaggcaacatggtgaaaacccatctgtactaaaaaatgcaaaaattagcccggcatggtggcaggcgcctgtgatcccagtttctcaggaggctgaggcaggagaatcacttaaacccaggaggcagaggttgcagtgagccaagatcatgccactgcactccagcctgggtgatagagcaagactctgtctcaaaaaaaaaaaaaaaaaaaaaaaagaaagagggctgggcacggtggctcatgcctgtaatcccagcactttgggaggccgaggtgggcagatcacgaggtcaggagatcaagaccatctggctaacacggtaaaaccccgtctctactaaaaatacaaaaaattagccgggtgtgggtgcgggtgcctgtagtcccagctactcaggaggctgaggcaggagaatggcatgaatctgggaagtggagcttgcagtgagctgagaccgtgccactgcactccagcctgggcagcagagcgagactccgtctcaaaaaaaaaaaaaaaaaaaggatgaagaaaagaagaaatgagaaaagaaggaacggaaacaagaacagttgatgataacctgccctgacctcaggaggatgactaatttaaccctctgcacctaaagtccacaagaaggagaaaaataaaatgatatctcctataactctaccatggtggcattttaactttctgtctaagcctcgaaccctcactcctgtgcaccctactgtatgtttctatgtggctgtcaccatgaggaacacatcactatgaatttttgcctgcgaaaatgcagcactgggccgggacttctggatatatgatatcattttatcctcttaacaacattgtgaggtgagtatcattatctctattttacagatgcctttaacctcagagatcaggctattcagccaactcctactactaataaatcacaaagctggcactttgggaggccaaggtgggatgattgcttgaggccaggaattcaaaaccagcctaggcaacataatgagacctcatctatacaaaacaaaatgaaaaaacaaatcacaaagctggtattccaaacaccttggcctcaaaggcccagggtcatgtgatgccattaagttgatccaatagcttcctcataattattaaggtctgcctagtggtccattctattgatggagggtaatttactgtaatttactaactgctgtcctatttctgagtatttgggctctttctagctttctgctcacatagatagtcctctaaattatcttcaggcccagagctttttgagtctgttgaattacttccttatcagggtggggttcctttgtgttcacacacaaatgttgacctcattacagtagttcattctcgttgacatggttttcacaaaagagttgaatggacaagcaggagttaaaacccagagactggccaggtgcggtgcctcacgcctgtaatcccagcaccgtgggaggcccaggcggatggatcacgtgaggtcaggagttccggaccagcctggccaacatggtgaaaccccgtctctaataaaagtacaaaaattaaccacggtggtggcttgagcctgtaatcccagctactcgggaggctgaggcaggagaatctcttgaacccaggaggtggaggttgcagtgagctgagatcgtgccgctgcactccagcctgggccacaagagtgaaacaccgtctcaaaaaaaaaaaaaaaaaaaagaaaactccccaaaaaacccagagactgtgtgtgtgtgtgtgtgtgtgtgtgtgtgtgtgtgtctgtgtgtctgtgtgttgggggatgggggatcatgtgaggtacaggaagttggggtagtgtgaggcctccggccaggcaggaagtcagtctggggggattcctgtgtcccccacatttccctaatgccttcctggcccaagctgtttggggtctgaggtgcaacaaggggaattaggcaggctgtggtccagccactctctctttgccctgataccccgcccctaccccaggccccctctactccctcaagaaggcctccgaatcttctctaagggtgggaggagtgggatggatgagcagaaacctgaagtctgcacaccctcgctctgctccctggctctctgttcttaaggcccagcttcccgtgctggacatcacctggggatctggttaaaatgcagattcttatttctcaactctggggcagggcctgagctcctagattactggcaagctccctagaaatggcactgctgctggtcccagagccccactgtgtagcaatgccctagggattctggccagggtcccagcctcccctgctgcccaagctccaggtagtgtttcagaattgcaattaaaaacatggagaggggcttaacccttggcaggggcaggaagtggtcccccaaattgaggcagcatttattcccctaagtccagatatgatgagctggaaaaggatggaaaggatccttttccaggcgatggaaaggatctaccaggaagaattagcccagtagaaaacggagacccagagaggggactggcttttcccaggttgcacagccagcctgtggaagaggcctggggatgccggtggcctgagctctcttcaggcttgtctcatagcctgacttctgggtacatggacgtggggaatggagggtctggcaagccctggggacagggccagggctgtggggatctgcagctgctgtgtgtgggaggtggacgctgggacggctctcccctggcagagttagctctctgaccctttggcagctgccctggctagcctgggaggggtcagctggggataggcagtaaatatagatctagggcaggaagccaggcggcccagccctgcactgacctctcgttggaagtctagggagggcagatgtccagtcctggaaccctcctctcccggggtgggggacacctagcccagcaacaccctagaattgctggaagtggttgggggtaggggacagagcctccaaaggggaccaggatgagggtaagcagaaagctggccaggagacgctgtgcctgtgtggccatgtgccctctctgggcctctgttttcttctctggtcatctctgtcaaaggtgctgtccagcttcccggtaaggggtccactgatctaaagggaattgggggctcacaagtataaggagcagggggcaaggtccccttacagtccctcctcccacccccacaggtcttgcttattcaggagaggaaggagtctcagagcataatctcatctcttgctccctacccactctctgggtgctggcctcccaccctagggctcagggtcacacctcagcctggctccccttgctgcatagatgcagccctgtgccaggcccgtgccacacacaccatgcccacctagttcagccaagacccccgggacccccgactctgggaacgggaattcaggcaaggcagccactccaacacagatacgtttattggcaaaacctattcccaggcatcaaggggaagggtgctagcagagtgaataatttttgtttttcactttccttggccatgttcaaggagcaaggggagggggagacagggacatcccagtcaagataaggaggatcccagcagctcccctccgaggttgggctcttcaccaaccaaggccttttcttgcactgtctcctttaatccttataacaacactgcaaggtaggtaccattatcatccccattttacagacgaggaaactgaactgtagcatgggcgaagtggtgaaaggtgggtgtcagctttcagggacaggagagcctcccatggactgagctagcctgggaggtacaaataatgttactctatgttgggctggaaccccaccacacacacatgttgagtctgtggcccccaaggctgatgtttccttccgttttttttttttttttttttttttttttgagacagggtctcgctctgttgcccaggctggagtgcagtggtgcaatcttggctcactgcaacctccacctcctgggttcaggtgattctcttgcctcagccttctaagtagctgggattacaggtgcctgccacgagacacccagctaatttttgtatttttagtagtaacggggtttcaccatgttggccaggctggtctcaaactcctgacctcaaatgatccgcccaacttggcctcccaaagtgctgggattacaaacgtgagccactgcgcccagccacctcctctcttttctaccacttcctgattctgtttcctccatctctcaccactttcacgtctttcaactctttttatctttttgttttataaaaaaataaatttgcccatgttcttggagagcctgctgtctcctaccccaattggtcagatctgggttctccccaagattcagtttagatggagttgaggataatggctctcaaatgaggggcctgaagttgtgtgtgaagccaaactatgttgaaaactcttagaaaatacgcaattaataaattacaaaccccctcactctcccgcccctaccttcccaccctcccccactccctatccaaatgtagaatcaactgtaccttgccccccacccccaccccagggcagggcttgtctcagtcccctcggagtccactgattccggggccctcagtaaatgtttgtggaatgaatgaatgagtgaactaatgagtgtttggagggaggaaccaaacacttaggaggcctgagtcccaggcccaatccctggatcatccttgcctgtaccttgtcctcaccaggacgcctctctctgggcccagagaagagggtctcaaggtaggggctgggagcagagtggggaagggaggagtcacaggggaagggaaagtggacgcatgactgacagaggacagagctcggaccttgaaatcagaaggcctggttcaaatcccagctgcacggctcagttcaaatcccagctatgtgaccttgggtacgttcaaagacaaatgatgactgctatagaacagtccctgtggagtttacaaagccctattttacatgtatctttggtcctcagtaaccatcctgtaatgtgggtattatcatcaatatacccattttacagaagaggaaatataggctggaaaggtcaagggacttgcccaaggtcacacagcaagcaccccacccgctcacccacctcctgcctttgcttctacccctgcctgtgctgggaagagggagggctcagatctaagtcttccagcacgggatccccagtgaaagtgtggcaacaggagggactgtgcaacaaaccccctaatgtgggccccatcggccatccccagccagaaaagccaggctaccctttgtggaaggtctcctggacacgccttccttccccacccacagccctggggcctcagctgctgctccaggaggatcctggagtccatgaggtgcccatgaacttctgcttttccttggaaggtggggatgtggaatggtgggggagggtctagggcctgggcccgcccctcacacaggcatggccacttcgtcgtattcatcccgaccttcctcctcatcaaaggttgccttggcatcatcagcatccagctggaggggagggacaggagagagacagggtgagagaccctggggccagaagagccctccccgggcacgaaaggcacctctggagttaggagagggtctggctgtcttgaaccttggaccagtcctgttttatctccccagcagctaggactggcctaaatgagtcgttgtcaaagtgagaggcaaccccggggatgtggaccctggcaggggagggcctgcagagggtgagcaggggaccttttcaccaaggcggccccacagtgacctgagtcaccctgtggaagaatcctattagaggagtgactctgtcccaaatgactcggaagacggcaggacttgctgcttaggggtccagctcactcacagcacaccctgtctgcctcttgacgctctccccagtcgtgccatcatttccccctttacaggtgagcaaaatgaagacacagagaaacaaggccccgtgctccagatcatatgctaggacacagcaggccagaacctggacaccagccctagccccagactttacccatgactctgtcctgcctgccctagttctgagacgcgcccctcgcatgctcccagctcttgtgccccaggcccaggcagccactcacacactgaagctccacgttcctgaagatgagcggcagcaggacgcgccgcagcggcacagtgaggatgaggacgaagggcagggccagggaggccggcgtggacttcaccacccacagcactgccaggcagatgatctggatgcccgtgaataagtgcatgcgccaggtcttcacctgcaggcggaggctggggtcagtgcctatcacaccccagcaccctctaccaccccaggctgggcagccagaaaagggtcctgtacccgcttgacgtagggcacatctgggtgatacttgggtggcttgaacagaagcaagatgcggtcaaagagctggatgccgctgagcgacgtgacccccatgtagaggaagatgccaaacagtacagccagggggatgcgggacaggatgggctccatgaggatggacaggcctgtgggggagccgcacactctcagcccaggttgcccgaggcctggcaccagtggggggtcaggcccctatctggggctgggaataaaacacaggcaccatatggagccatttcttttttccttttcttttctttttttttttttttttttgtttttttttttgagacaggatctcgctctgtcacccaagccagagtgcagtagtgtgatctcggctcacaacagacttaacctcctgatcccaagtgatcctcccgcttcagtgtccctagttgctggaactacaggcacatacaaccacacctggatcattttttttttttttaatttttagtagagacaaggtctcactatgttgcccaggctagtcttgaactcctgggctcaagtgattctcctgccttggcctcccaaagtgttgagatcccacgcctggcctggagctattcctatgggtcttttttttttttttttttttttttttgaggcggagtctcactctgttgcccaggctggagtgcagtggtgcaatctcagctcacttcaacctccgcctcctgggttcaagcaattctcctgcctcagcctcccaagtagctgggattataggcgtgcgacaccacgcccagctgattttgtaattttagtagagacgtggtttcaccatgttggacagggtgacccacctgcctcagtctcccaaagtgctgggattacaggcgtgagccacaacccccggcctctatcggtcctttttataggtattaccccaattttacagatgaggaaacaggctcagagaggtaaacaacctgcctaaggccacacagctggcaaggagtcaaagccctgcctgcctgacttaagcccactcccttaacctaatgagggtcacagaggtcaaacacacacacctttctcctcaccccagcccagaatgccatcaactgcctcctttaagaattttccctgacctctccatctgcaaccatggcactgcccacaccgaacccagctcgactcttggctgctccagaactgaaatcaaccccagtgacccttctttcttctcccccacatccctggactatggctagagcaccgccccttgtatcagtcatggagcagctgagctggaagagaactgggggacatctgttgaaccctccaactgtgcagacagggaaactgagacccagagacaaggagggatactgggttagcagcagggcagggctagaacccacagttcactggacttctgttgggtaagtcagaaggtggggtctggtctggagaaggcctcggagtggagcccccttcctccctgctcagacgcccagcccagtgccttggcctttcctccaggatcccctcgtgtgagtaggggatgctggggagatgtggggaagtggtgcaggatgggggaggctggaggaggtgctgggtccgaacagaaaggggaaggggaaggggccgggggtgaggggcaggaggatggtgaagacgcgacccagctttcactcacccacaagcacagcgaccaggagtccactgatccgctgctctttgacctcctggatctgggctgcagcccctggggtgctggctttgcccatgacagtgagggcgttggcatgggtgacggaacgcacggtggtggcactgagccagggcatcccaaagagggcggccaccccacccatgcctactaccagcagcaggtccaggtggaagccggagcccttgaccatcttgcgctcaggtttgctgacaatcagcctacggtaggggaaggtgaggggtaagcagggttctcccctgcctcctccaccccctccttccttctccatacttggtgtccttgtagctcagttttgtcttctgtgcccctcgctctttgagttccttgctcccctccctcccgccccatcttgagaatccaaactcttaagagcagaaatgtcttcacaacattcaaggctgattcgcaggcaacgaagcttcagcttcagggagctttgcttgtacaggcccctccaagatccagcacctaattttatagttgtcattttgcatttttttttctttttcttttttttcctagagtcttgctctgtcgcccaggctggagtgcagtggtgcgattttggctcactgcaacctctgcctcccgggttcaagtgattttcctgcttcagcctcccaagtagctgggactacgggcacatgccaccacactcggttaatttttgtatttttagtagaaacggggtttcaccatattagtcaggctggtctcaaactactgacctcgtgatccccccgtcttggcttcccaaagtgctaggattacagatgtgagccacctcacctggcgctttttttttttttttttttttgagatggagtttcactctcgttgcccaagttggagtgcaatggcgagatctcggctcactgcaacctccgcctcccgggttcaagcgattctcctgcctcagcctcccaagtagctgagattacaggctcgtgccaccatgcccgcctaattttttgtatttttagtagaaacagggcttcaccatgttagccaagctggtctcgaactcctgacctcaggtgatctgcccgcctcggcctctcaaactgttgggattacgggcgtgagccaccgcgcccggccacgttttttttttcttaaaaagagctctccaaattatacaacttctggtcccacaaaacctggaactgcccctggcttttcactattcctgctagtcgggagggccacacacccgcagggactagcttgcagtcctgggtctcttgcctgcctgggagaatgccagggaaaggtccctgcctcccaccctcccaggcccagcccccaccctgtctctcacgtggtgatctgagactccaggaatatgaggatgaagaccagcagagcaggcagggcggaggcaaacatcatccagatgggaaactcggaacgcaagcccagtgggtggatgacccagccccgggctgaggagttggacaccttgaagccatcaggcaccgagagtttctgtgggagggggtagcaggtaagaatgccaagggcaggaggatggggaagggtgggagcaggaggagccagggtcctaggggtcgggcagttaggttggaggcacttgggaacttacttatattgagcacttgctctgtacctaatcattacactaatccctttacatccatctgctcgttccccactttaaagatgaggaaagagaatcagagaggttatgtagcttgccccacatcacacagctatttgatggcagagctgggattcatgcctagatctgcctggctccaaagaatacttcttcctactgctctgggttaaggaatgaaggtggcaacctggcccagcaccttgctttggccacaggggtcctctggggctgtgagaagcacatgggactcccagaggaggcagggatggggtagaggtagtcccagctggcttcaggttggggaaagctattctagggaaggggcatgctggggggtggaaatgaggacctggggggtatcatggtctgagggctgggaggaggggtcacctgggtgtaggtatcctgaatgaagaaatccaccaggaccatgatcaggatggagatggggaccccgaagtccccgatgacccgacgcagctgggggcaggtgaaaggaccagtggtcagtgcccagtcactccccacctcctgccttcctcctgccctatattcacccacggggccctgctcttccaggggatccatcagcatctaatgccctgtcctgcacctcagctatgtctgcctcctttcttcttcccccagcagttctcaggctgggcatgccatgaaagtgggaggggcttgcccatagagtgaaaccctaggtaaggatagggccaggggaggttggaattgggaatgggaatctgaaaaagaagggaagctaagggcactgaggaatttggagcgggggggctttgggctgggatagggcagtgttggcaaggacaggcgaggagggtatgctgaccttgccagggaaataggagctgttcttgaacttgcgcagcatcatggcaaagaagaaggtaccggccatgagcacaagggagaggagggctgtgttgggcagggggccctgaggtttgggcaccatcaacacgttgtagttataagtcttctgtagtgggtggtcctggaagatctgcagcagaaaaccaaggcattctgttctctcccagctttggcttgggctggaaaataccaccagctaactctacccagcactactatccattcatccagtcatctattaattcatcatccatccatttatccacccatccatcattcatctatccattatccattgatcatccattgattattcatccatccattcattatccatctacccatccatccacctacctatcatctatcaacccatttatccatccattcatccgtccatcatccacccactcattcatcaatcatccatccatccaaccatccatccatccatccatccgtccatccattatccatctattcatccatccatccatctatcttcttcctcaattgacatggaaacagaggataaatgggattctacagcttggttttcaggaatgaagacagcctaggtttaggcagggagggccatggaaggcaatgggtgtgtgtgcgagcacacatgtacacccaggacctgggagacatgagaaggctggaggtcaggaaacaagggtcagggaagtttctaacaaggggttaaaagacctggacacagaaagaccctccatccaacagaatcaggggacaacacatagggctcacccttctcccatataaaatgcaggtacaaaggcaagcagagcttaagatgatgggagccaagccaaggtggctgggcactccatccacaagccctgcagctcttgaggacaagcacaggggagggagtgggggacttcagaggctccagagtccccccagctctcactgtgcatgtactttcacatgctcagtgtcatgcccatacctacccattgctcacgtcatgtgtggtcatgaactggacatgtgcacacagaggcaccctctcatgcctcagcaagagtgctggccacaggcagcaggtgccaacacatatgtggtcacagtcaacacagctgcacagtcctgtgtgcagatgtgtgactacacagacatagacacatatgttgacacagacacatatgttgtcacagtcatgtgcacagtcacatggttatgtacacaggtgaaagcaaagacacacaaatgctgcacagacacatgtgcgaggacacaatggctcagtcttttttttttttttttgagacggattcttgctctgttgcccaggctggagtgtagtggcacaatctcggctcactgcaacctccacctcccgggttcaagcagttctcctgcctcagcctcctgagtagctgggattacagatgcatgccaccacatctggctgatttttgtatttttaatagagatggagtttcacaatgttggtcaggctggtcttgaactcctgatctcgggtgatccacctgcctcggcctcccaaagttctgagattacaggcctgagccctcgcacccggccactgtctcagtcttatacacaacctcccgtgtgcattaacatccccataggcccccaccttgatcagcttggagaaagtctcatagatgaagatgagggaaatgaggaaggagaagatctcctgggtatagcgggagatgaagcggaccaggaagctaccctcgaaggccaccaccaacaccaccagcaggatgagccagaagccgatccacacgcggcccacgatgtactctagaccgttggtctcgcagaactgcagggtggtcagaagaagccggtcagtcaaagggtcttggggcaaggcaccatgcatcaggcaggtggtgcgggggacatgacagggtcagtggggcaaggacagaactaccgagaagaaggcttcctcaaacaccagcaggggtcctgagaagccgaccacaagcaggggctgagcccccagcagggcgaagagaatgccctgcactgcagtggagatcagcagctccgacactcccatctggttccgggtcttttctcctgtgggtagaggtcacagtgggatcaaggtcaggagatcatttccaggagcccatagagcaagtcatggtcaggctgatgcaggggtctggagggtcagacagagtcagaagttggggctgagacagaggccagagggtcagaggcaagagttagggagacaggtattggcactgacccaggaggccgccgaaggtgatggcgggtgacagtgcagcaaagtagatgaagatgacggcagccaggacctgggggctgaatgcatctgtgatgtcactcaggtaataggggtagcggcgccggatatcacgcaccaggcccccgaagagctggcctgtctgctgcagagggtcatctgggcccccatttaagtctgtggtggaggataagagcatggtcagagggagtagctggaggaggtgaggggaaaggggactggagggtgtaggggagattgtctgatgggaatggggcggcgaagaagtctggaagatgtgggcaaagggagcgatgagaggggaacatgtgatgggagacagaggctacgctgaggtgtctgggggtcggtgggggctcagaaagcctcagctgggaagggcaggtacctaggcccttgtagaagctggagtctggcttggcagggctggactgatagcgccttcgaagtagctccctctgcacaggcaccagactgagcagtgcctgctcggagggggcatcggtgggaggcagcactaggctgcagtccaggaagccctctagggagtgcagcagctcccctcggctctgagccatgtaggcatctatgcggaacacctaggggcaggagacagggtcagagctgcccggacctgcggagggaaaggacccaggagtccacagccagggcctccaggaaccagaaccccctcaggcagcagctcccattgccaggaactgcttttcctgcccgctcccacccctactctccccactaagaaagagctctggggagacagacgggggccctgggtggggaaaggagaaggaactaaagctaacctggtgggttaagcagactagatgaaactagagctgactaggcccgaccaagcctgacctgaccaggtggaaccaggtcatagtgagctggactagactaagccaggccaaagccaaccagacgagaccaggccagagcagggccagactgcacgccccgactgcccccgccaggtaggatagcagcagctggattaggctgaatgggtcaaaccagtgaacctaaagtaacccaggccaggttggagagcaggcctcagccaccatgcaggtcccaagcttccccagcccagccctctccggcccttccttaccctctctgacatgagggtggcagcagcccggccaagctgggtgtaatcgatgtggggggcctcaggtcccagcaacacaaagaggaagcgtataggcaccggcagctccaccgcctccagctccgctgcctcctgcagcctcacgaagcccagcaccggctgctccaggaagtcggcgcggcctgttaggggatgagaagatcaggccaggccgaggagcccagggtgggtgtgctgaagagatggggctgcgggggtccaggctgagggaaagacaggctgagccaagacacgaggggtgtggagggctgagggtagagatgcctgttcttacccactagcaccaacgtggcctctgaatccgggggaatcttttccagaattccagatggtgagtgcccttctgtgcccccatctccctgtgggaaggagggtggtgacgggagtcctcgggccagtctgacctgggagacctgagcatcctccccttcccattctcgcttcccaactctcctggcaccccccgggcacaggagtgcttctggtcccctgcttgtggtcggtttttcaggacccctgctggcgtttgagaaagctctctccttgccccaccctgaccctgaccctgaccctgtaactgactcacctgctcacagaagagctgtgtctccagtgaggagtgttgggggagcagaggctgtgaaggatccccagagcgtgtcaggactgcaggcttcacaccccccagggcctccagctctccagcgtggctgcaggacgtacaggggacatgggctgagtaagctgttcaggctgagctatcagtggtgggagggatcaagggcgaacatcaagggactggggtagacatcaagggtagacatctgggacttcccagaccagaccagagagaccctgggatggaaggagaatcagagcctcctctccaaggacgttgtagatgtaagtgggtggcctctggaatgacgaggcgggatcaagagtggctacagaaaagggccttgcaggtctgccctcctggggaccaacagcccccaactctgagcataggacatggccacccctttcaaggtgtcagagatgggagccatagtggaggaaagtgggcccctgcctggtgagggtagggccacctggatcccgggggagaacttggggcaagtgggctggggaagtgggcccactggatatggaatccaggccctggcaggcaggggcacctgtgtttaagcagcagggcccggagcagctcctctcggtcctgaggccggatctggtcttcaaagataaacctgtctagcagttggttggccactccagccagggaggtctcttgcaggtctaggaggacagtacctgcaggcagtggaggagtgagctggtaggctgggccacagcaccccacaacaatcctcatctgcagggggtccagaagggcccaggaggctcacccttggtgaagactctacgcagctctaggaggctccagaaggtgaggtgagagaggtgcgggcggccccaggccccattctcccccaggttctcctccagttgcacccagcgcgccgcctccatccatctcagctcctggttcttttcgtccatcaccagctcctgcagctccacatagacctgtggccccatgcgcctgagttagttcatcaggcatagtccagggcatagtgggtgctcagccactctcgagagaggcttgtgcttgtgaggcttggatccctgtgctcaagggtccgtagatacggctcacaccactcccttatctcccaacttcctggccaggcctttaccccattgcagaaggcatttggagaaccctgacccaaagggatgctggagaggccactggggagggaaaggagtgggaagcagaggcctggcgggccgaagctaaaggggactttggagtcattgggtcagtctccagcctctaagattgttcgtggatgtgctttagcatgtccctgaggccaggtggttgctccaagggccatagctgagggccaccccaaatttctaaccacttagacagttcagtgcccagtggggacctgaggggcctgggcagaggagaacaagtctttaattctgtgcttccccagtgacgcccgacagcccagccagggcctgagggcctggggactcagcccttgtcaatcaggttatctctgcccagggtgctcctggaaaggggcccaggcctccccatcagtggggcgtccctcccacctgtttcctgggatcctcactcctctatctgctgcagggtctcccccagcctgaagctgcctctatccccttgctcctctcttccctgatcaaatggtgggtcccaaaggcagcatgggaaagaacggaggaggctggggtcctcaccttgtgggtacccgggtgtgatgtggtgtggtagtctgtggctgttgcctcggtgtcgtgagctgaaaaccagaggtcggttagtattgacctgaccgtcccccacctgaggctcttcaccatccactgtgagcctcagagacccaggcatgggcagatgcccctccttcccagtgccctgggctgggtctctggtgccgcatcccacactggccactcagcagaatgaggctccccacacttgtgtgctgggcctagccttgggctccctatctgagccttgtcgaggacacccgggattcagccagggaggcctagcccctccgcagtgatgaagtgaagggacctctccaaggtgacggcagagccctgagtggcaattttcaggatcctcctaggacctcctccctcccctgccacctctgagaccagactcccttctctcctcccacctgcctcaatgagcccgtcagcacagtgtctcactgagctgaggcaccagggtgggtcagccccttatattcccacccctcccacccccagccctcatttccaagaggggcctcttaactttaatcccaatctccagcacttaagtcctgttgacagtaaacaggtcctgcctggggctccccacctaagaccttggacaggccagggaaggcagggtggttcctggtgtctttctatctaggagggtccccacaagcccctcatttctcaggacctctttccccaagaacaagcccattttctggcctggaagctggcattggatgggcacagatggcatgtgggctcacgcccttgtcccaaactggctgcccgcccttctcacattgcaggggcactggatgggtgactgcccctgctctcccagccacctcctgtgatcatttcaaacaaagctctgtttatccttcaatcagccagaattgaggggagaacggcccgtggtgcttgggaggaggactgtggagaaggggagaggacaagtgcccctcctgtccctgtctagggctcagcagctcatcccagctgagggagggagaggggctcacctgccggctcctccatctgggactcggggatgtctgggtcttcatattcctcctgctccagattctcctccatcatgtcttcataatcatcctgtgggaagtggccgctgaggctgggctgtgaggggctcttccacccccaacgaagataggagtctaggaccaggtccccagagcctccaggtgggagcactgctgatgccagggaacacccacctgcagctcctccatggcgtggtcctgagtgtccagttgtctacggtgatctgagcccccagcataacccgcaccgcgggtccctgcagcagagggcacaggctgagtggggcacagggcatcccagggtctcctggtcctcctccagagggggccacatgtcagtggaggggatccacgtgttggaggtggtagggccagaggaaggaagtgtggagggaaagggagaacgagctggatttgcaggtgtgagggtaggtgagcaggggctgggagagaggggcagtgcagggaagaggtaagtctggctggcaccagcgaaggatgtttggggaagatgggcaggtcaccctcaggtccatctccctccttcattctctagtcttcacctggcttcttttcttgcccatccctgggactcagctaataccaggggacctgctggtctcttcttcaggggggcttagctcccctgaggggctctaaacacatgctcttctctcagaaatagctgctgcccaccgggcatgggctgcagcatccttgggagtggtccgcaggtctggacgatgtggtcctacttctctccctgaccccatcttgcactccgtctctctcgctctctccccacctagcctattggcctcctgtggttcctagaactcactaagccctttcctgtcccagggcctttgcacatccagctgtccatatcccggacaccctccccccaatacctcagaccttctcacatctcggcccaaatgtctcctcttcagaggccctccctggccaccaccttgacccaatctgtcatgttctggtttcttttccctccctccttccctcccttccctccttccttccttccttccttccttccttcctccatccctgcttccttccttccttcctctctctctctcttcctttttgagacagagtctcactctgtcacccaggcttagagtgcagtggcatgatcatagttcactgcagccttgaactcctgggccccagggatcctcctggcccagcctcctgagtaactggaattataggcatgccacagtgcccaggtaattaaaaaaaaaaaaatctgtgtgtagaaacagggtctcactatctcagtgtgggctgctgatttctttcttcttttttatttttttgagagcgggtctccctctgttatccaggctagaatgcagtggcatgattacagctcacatcagtctcaaactcctagacttaagtgaacctcccacctcagcctccagagtagctagcacacaccaccatgcctgactaatttttaaatggtttcttggttgggcgtggtggctcacacctgtaatcctaacattttgggaggctgaggcaggcagattgcttgagctcaggagtccgagaccaactgggcaacatagtgaaaccacatgtctacaaaaatacaaaaattagctgggtgtggtgacgtatacctgtagtcccagctacttgagaggctgaggtgggaggattgcctaagcctgggaggcagaggttgcagtgagccaagatggcaccactgcactccagcctgggtgacagagtgagactctttagaaggaaaacaaaacaaaacaaaaaaaccaatacgtggtttcttgattgatttgtgttcatattatctgacaatgcttttggaagggaaactacctgagtgcgaagaccctgtatgtcccatccccacgaaattcactactcctagcagagtggctgtcacgtagtaggtgctcaataaacatttactgaatgattgtaagaatggctccctattgcggggttggggctctgagactggggagccaggatgactaggccccagccaagaggcctctgagctcggggtctcagttttctcagttgtgtccctagcagagaggaaggtgtgccttccccaggaatgtgagggcaggtccaaggggaggacaggggtcacctaaggtggccccagactgggtgtggaggtgcctcttttccctcctcgcccactacagcacagggcattgaggtgacaggcaattgggtcggttcaacaaaggttcccactctgtgcctggcattgtgttgagcactggaggctgtggggagggggtgccgagcactgggggctgtggggagggggtgctgagcactgggggctgtgggagggggtgccgagcactgggggctgtggggaggggctgctgatcactgggggctggtgggagggggtgctgagcactgggggctggtgggagggggtgctgagctgaacaaggcccgtctctactctggggaagctcctagccgcgacagggaggcaaactgggaacacagggcagcctcagtgcttccgaggtgacatggaccccaggggccgaaagtgctgagtgccaaggatctgtatggcaggaagaagagcaggacgcgtttgcagcactcgggggtggagtcaccggaggaggggtcactggcgctagcctaaaaacacaggtgagtttttcttgtttttgagacacagtcttgctctctctcccagtctggagtgcagtggcgcgatcttggctcactgcaagctccgcctcctgggttcacgccattctcctgcctcagcctcccgagtagctgggactacaggcgcccgccaccacgcccagctaattttttgtatttttttagtagagacggggtttcactgtgttagccaggatggtctcaatctcctgacctcgtgatccacccacctcggcctcccaaagtgctgggattacaggtgtgagccaccgtgcccagccaagcactggtgagatgtgaagggctgggagtccagatgtgaggcatgcctgggtggagctgaacaggtgggctgagcaaggtgggaaaatgccacgtgagggcatggggcagggagcctggccaacatggtgaaaccccatctctactgaaaatacaaaaattagccaggcgtggtggcgcatgcctgtaatcccagctactcaggaagctgaggcaggagaatcccttgaaccagggggcagaggttgcagtgaaccgagattgcgccactgcactccagcctgggcaacagagcgagactccgtctcaaaaaaaaaaaaaaaagaaagaaagggatgtgcaaacagccttctttctgaggaatgggtgaccctgcagtcctgggggtagggaggggattactggatctcaccagactggagaatgggagagacccctgccttggcaggtggggcaagtgatggggtgcgggggaggggtcctggacctgaggacgaggtagtccctactgcagggcttggctttgctcctgaggaccctgatgacccacctcttctctctctttttcctcctccctctctgcttctcccaaagttcctctttctcttccatctttattcactttcttccttctctggacttgcccatgcactttcttaggcctcagatgctaaggcctccagggtgtctaagccttaggtactaaaagtcccacccatggggctgggactgtggccttggttgcctatctgaggagtggaatggtcagaggggccctcagagctgcagaatccagaggtccaggctgcctctctgccactgactggctgaagggccttgggcagcttccagcctgtaggcctcagtcaccccatctgtacaatgggagtgccttcctgccagggttctgagacatcagtgagagagaagaggggaaaacagaggtgccttgagctcagttggagacttacagggcgcacccatgacccagattgccacccgccagccaggccgccccccagctgcaggccttgtgctgcctagcactgataagggcctggacccagatcgctgccccaagttttggaagtgcaccaaacacctggccagctagccagctggccagggccaggccagataagggtgagcgggacatctgagcctagaaggtatagcacagctgggaagacacggcgggagaggggattgaccagatgacagggacaacttcctagtggtatggcaccacctttgtgtaatcagcccgaactgcacaaagaactgtactgccttaactcttagaatccccaaagcattctgtgaagtggtttggggattctaagaggaagaagagtaatgtcattaatccattctacagatgcgaaagctgaggttcagagacatttacctgcttcagccacccagcaggtaggtatcagagccaggttacagcctggactacctgactccagccacatccctaagcactatgctaagttgcctccaacaaaacaactgttagctggtttagagttagttgttaagatcacggactctgcagtcggactgcctggattcaaagcccagccctgccatttactaacggcgtgtgacttcaactctctgtgcctcagttttctcatctgtaaaatgggggtgatgataatgatgcccatctcatagacctgttgtaagcattaaggaaatttacatttgtaaggggcttagaacagtgcctagcatataaggagcgctatgaaaatgtttgctgtcattatcccttgctgctggggttacagtcagacttgccatcttcatttcccctctgatttgccctcagttcccatggaattagcctgagctaagtgttttgagattctcatgtggtaggaggctctgcagttccctccaatactgaccacgctgggcgtggagccaggtgccccaggtagacccctggaagtgtcccaaaggggatactgtgtcagctgacatcctgcctcctaggtgggagagggggtggtctgaggaccccattaggaaggaaggagtctggggtggacaagacctgaccctgtgggatccaacaagctgacaagggcccatacctggaggggatcagataccccccgcaacacacgcaccggagccacacatacctctgctgccattgaccacctgccaccctcctcttttcaggtgccaatgggcctgttcccttaggggcaacatatgcatggtaacattctcaccccacccacctgcacccccttggaggtcaggagcctggcccacctgggcatagattcaggctgggcacctgtagaagccctcagggcaggcaccgaaggaccatccccagcccctccctgccctgcccacctgctcacgagcctcagggtcccttggtgaagtcctgcagccgctggtgccctctgcgaccagctacgttcccactcgttctgacagcaccagcgccccaggggcagctcgcaaacccctgactcatgcccccgcctcctaatctgcccgccccactggccctgggagccccttcccacaccccccaccccgctcccactgggtgcccagtaaacagagttatctcttacccacatctggacagctgtgagtctggcccaccccacccgcctggccagcccccaaggcctctcggggccctcctggtccccatggttctcctgactcttcctttgtggatgaaggtttgatcgctctgtcctcagggctcccagtgccctggcaggaaggcaccagcctccagaggtccctgtcctgcctctgtccatcctccactctggccaggcccttctgctctggccccaaggtgcaagggcgcctgctcctctcgtctctcttggtatccacgctaggactcactcctcctctgcagttttctccacagggaactgctcagcactcacggggcacggacagccccctcccctccttgatccagactaggatgccccagccacattctccccaagaccctggctggttctaaagagctggctcctggacactaagacactgacattcagtcaacctgaaacaatgtcagctcaacaaaacaaccatccccacaccaagctcttcaactcacaaagctctaatgtctgggcatactggctcctctgtaggcagcctggctcaggcccccaggccagaacagccgcattctcagcccctgccatgcccctccccttcagttcccacccctacacccccagtttctctgctctggggggtgaccagagcctggtcacctcttcgtaggctctggttgctaaagaggcagagactgaaagatgagtacagatcagcaagaatgaagaggggttttcaagcagacagaaaggggtgttgtggccatcgctctgggcacagagaggagggtgtcctagtacagctccggcatggactggctgaaggaacctggacaagtccctggccctctctgggcttctgttttctcatccgtaaagtgagagtgttgggttatgtggccaccagcctgaagttcagactcaagcagaagaaactcaaacacagggacacacaggtggacaaatcccgccactgcaagaccattcactatctgcaccacaagcctgccaggggctgagtcctgtggagagagaaaaggggagggacacgggtcctgaggcagaatcctgtttatggaggacctcggttccaggaattatgctgaggccttcatcttgtggtcacgctggattcctacaaaccccccacttcacagaggaggaaacaaagccacagagaggctttcccaggaaaaagaatgcccaacggaccagcacctgccccgtgcagtgcaccatgcctggacttcacacgctctagcttgccaagctctctaagcccatctgaggacaacactgtttacgatgtttattcacctctcacagagaaagggcagcaaaaggagagcagtgacttgcccaagtcctctgggctggtgaagccagcgtgggcactccgacctgctaatctgcctggacagctggtgttctgccagatctgagcccctcccaccacccaggccttggtgccggtcaggaacagagagaggccctggctaaagggggctggaggtgccttctcctgctccagctggtgggatctgtcccaaaccctgggcccacactgggttggcttcctatggcctgtggcagtgagtgccaagtgaagacctttgactccttgacccagccagtgtgcccagtccccttgcccctctgcctgccctaggagtcagagacagctgagtgcagggggcagcaatggggcacctctcctggggcccgggaaggactgacagctggctgggggtggaacaacaaatggcatcatctggcttagggggaaaatctggccagctgtttggctgttctgcaggcaccaccccctggcagccccaccagacagccaggcagaggcacagcagcttggacgctggttctttccactcacaccacatgttctagatcattcttgttgccctggctgaatgtagatgtttcttttctaactctgcccaatgtcacatttaatctttttttttttttttttttttttttttttgaggcggtgtttcgctcttgttgaccaggctagagtgcaatggcgcaatctcggctcactgcaacctccgcctcctgggtttaagcgattctcctgcctcagcctcccaagtagctgggattataggcgcccaccaccatgccgggctactttttgtatttttagtagagatgggatttcaccatgttggccaggctggtcttgaactcctgacctcagatgattcgtctgcctcccagaatgctgggattacaggtataagccactgtgtcaggcctcttttgttttttgtttttttttgaaatggagtctcactctgtcgcccaggctggaatgcagtggctcaatttcagctcactgcaacctccaccgcccgggttcaagtgattctcctgccttagcctcttgagtagctgggattacagacgcccaacaccacacccagctaatttttgtatttttagtagagtttcaccatgttggccaggctggtctcaaactcccgacttcaagtaatctgcccacttcggcctcccaaagtgctgggattacaggtgtgagccaccttgcctggcccacatttactcttgtttatgcttttccaggaagaggtgagggcaaccctcactcattttattccaatttggacttgggtcagtttgattcatctgaaggcctccatgcgcctggcactaggctgccctctggggaagcaaggcacgagggagtcttacctccctttgactatgccccgggctggacagagatggtcgtggtcagaaagattggcacctggagggcttgagcagagccccaagatgccttgagctgtgccctgagtggcccttcacacactcacagcccatcctgctctttccttggagtccctcttgtcactactgctctaccacttcctagagcactaagggaggagccctcagattcccctccccaaggtccatatgtgtcctcgttcaaatttatactcctttgggagaaagccgggagcccaggcagatgtcagcaggaatgaagtgagctgagggcgaaccccgtatgatgttatttcagagcatacagctcagatcacgggttgggatgggttgtcccagagggagactctgtgggcagagggtggagttcttctgaaaggacaagactttctcattttctttttcctttttctttctttctttctttctttctttctttctttcttttttttttttttttgatacagaatcgcactctgtcacccaggctgaagtgcagtggcgtgatctcggctcactgcaacctccacctccccggctcaagtaatcctcctacctcagcctcctgagtagcggggactacaggcgcacaccactacacccagcgagtttcgtattttttgtagacagggtcttgttatgttgcccaggctggtctcaaactcctggcctcaagtgatcttcccacctcggcctcccaaagtgctgggatatcaggtgtgagccactgcacctggccttactttctcattttcaatcatcctggatgcagtcagccctcaagtgagaagtgaggactgggtagtggccttagaagggccagctgctttctctatcttactctaaggagtagaagctgagactaggtaggacgggggttcgatgatggttaagggaactgtctcttgcaatgggattggcaatgaggtgtcagcttggcctgtgactgctgagggcagacccattccatgtgagcagacccttacatcttttcttccatgctcagccggtaattctcagctgctatcctgaagtcctcagcaaagcttgctggactggatcacctgcctctgttaccccatgcggatggaggggagggtctgagaccatgtttggggcagagcaggccatggtttgcggtggcagctaaggtgagtggacatccagatggcacgggggagcacctgaagggaggtgtggtggctggagccaggaggctggaggaggggacgtggtctggccaaggtggcctggagggacctatgtacattgctcggtgaagatacggctttctgtgccctcatagactagggactcagacccctgggattttgcattaaagggaagtgtcccacggctgggacatgtgggctgtagaggacctcctcgggttggaagccctgtgtgatcttgagctgaccacaccctctctctggacttccttttcctctctggactgttgtgaccacatgggatgacaggtgggaaagagcttgaaaatagtcttctctagatgcaggcaaggggctgagtagtgaacgggagaaggagccacggggctcgtgtatcaggcagcctgagccaaggcagcagggcagggaccacgcagcgataggagttcatgtccagcagggagtgtatacaaacctcagagggaggataagggatgtaaacaagggatgggcccggagggacaagtaatgcgggaagtgtgaggtccccagggagaccatgctggtggagggcccagagttgtgaggtgcagccctgagcagtctgggggtggatggaagtggggcagggtgcacacacgttaggaatggaccagtcatcattatcacctggtgagggagtggggaggtgcggggaatcaggcgggagagctgggggatggggctggaactggaaaggctctcagagctgagccagtccagtccccctaccctcagaaccctgtgccccgtgaccctcatcaccagcaccctcggctgggccctggggagtcctgggaggaaggcggtttctactgtctaggggcagccaggccagatctgtgcaaaaataactcaccctgagcatccttccagagatacacgctgggagttctgcagggtcccctgagagctgaggaggaggaagaggggaagtgggagttccagcaggactttgaaggatgggggcggtttctccaaatgggaggaggagggaggtcaaagggcaggtttgggccagtgtgatggctcaggcctgtaatcggcactttgggaggccaaggtgggagaattccttgaagccaggagttctcaagaccagcctgagcaacatagcaagacaccatctctacaaaaagtaaaaaaaaaaaaagttacctttttagccaagtgtggtgacacaggcctgtagccctagctacctgggaggctgagatgggaagatcgcttgagtccaggagttcaagactgcagtgagctatgatggcaccactgcactcctgcctgagtgagtgagaccctgtctctaataaagaaaataaataactattttggtggctcacacctgtaatctcagcactttgggaggctgaggcaagcagatcacttgaggtcaggagatcgagagcagcctggccaacaaggtgaaaccctgtttctactaaaaacacaaacatttgctgagtgtggtggcgcatgcctgtaatcccaactcctcagagggctgaggcatgacaatcacttgagcccaggaggcggagcccaggttgcagtgagctgagatcctaccacgcactccagcctgtaaaacagaggaagaccctatctcaaaaaataataataaataaattcaataatttaaaaaacaaaaacaagggcaggtttggagagctgtggggtcagcttggctctgcagagagttcagtgtgcgggggtgtcctgggaggaggatctgcttgaggggctcaaggcaggctgtgagctctctgagtcttgacactcacctttctctgaatgttctctgttctcttggcttctggatctttccatgcactgttcccttgtcctgagatgcctttcctttccaaacttgctggaccaaagctttgaccttcaaggttcattgtttgcattcccagctctgtgaattccttctctcccgccaaccttccaacccctggagattgacaggtcccagcccagcacctacctgtgtcattgcctctctgctccctactgagatggtccatggtcctgtgtgtctcctccacagatcatgttcccaaggacaaggaccctcactcaggtccttaaacctgaccagggctctgccggtagttgatagtttatatgagtttgttgacttgaatgaaatcaatacaaaaatccgtccctttgccgggtgcagtggcacatgcctgtaattccagcactttgggaggctgaggcaggaggatcacttgagaccgagagtttgagaccaacctgggcaacacagtgaaaccctgtctctattaaaaaaaattctgtcccttaccccactgccaaaagtataggtgaaaaaactaatatttgggctggatgcagtggctcatgcctataatccccgcactttgggaggtcaaggcgggcagatcacttgaggtcaggagttcgagaccagcatagtcaacatggtgaaaccctatctccactaaaaatacaaaaattagccaggcatggtggcacacatctgtaatcccagctactcgagaagctgaggcacgagaattgcttgaacctgagcggtggaggttgcagtgaaccaagatagtgccactgccctccagcctgggtgacagggcaagaccatgcctcaaaaagaaaagaaaactaatatttgagaaaggtcaaacaagtgatacattaacagtcttattttattcgaatcctttccctaaacacaagcaagcaaagaaacaaaccctgagcctcctccagtcctctccatccacttggttcctcaaatccccaaacccagttgcttccttgactcttaattttccctcactcccaatccccacttccaataacagctcattctactggatctagcttcatgcttctatcctcttctccccatctccactgcccacccgccgggcccctcatcatgctcctccgtcaccccaggagtctctcacctggcctcctggcttcacttaggccccctacaatgcggttgccacacagcagtcagagtgaccttttagaaacataaatcagaggatatcatcctgagtgtaaaatcctttgtgacttccccacacccattccctactccgggcaactcctgccctctgctcacctcctctgttcctcgaaagcacgagtgccatcctgtcgggatgctcctccctgatctccccatggctggctccttctcaccaggcaagtctcaggtcaaatattacccctgcaaaaggccttctaaggccttctttcatcacccaattggacaaaaaccccagccactctcgctgtggcaaagaaaatcaagacagactgtgtgcgagagaaaactcaaaattttagtggcttaagcaagatagaagtttatttcttggctgggcgcggtggctcacacctgcaatcccagcactttgggaggccaaggcaggcggatcacttgaggtcaggagtttgagaccagcttgggcaacatagcaagaccctgtctctattttttttgttgttttttttgagacagagtcttgctctgcaggtaggaggaaggggtaaagaggaatgtgtcccctttctttattttattattttttgagatggagttttgctcttgttgcccaggctggagtgcaatggcgccatcttggctcactgcaacctctgcctcccaattcaaacgattctcctgcctcagcctcccaagtagctgggactacagccatgcgcctccatgcccagctaattttgtatttttttttttttttttgagacggagtctcgctctgttgcccaggctggagtgcagtggcatgatatcagctcactgcaacctctgcctcctgggttcaagcgattctcctgcctcagcttcctaagtagctggaaccacaggctacacaccaccgtgcctggctaatttttgtatttttagtagagacggggtttcaccgtgttggccaggctggtctccaactcctgaccccatgatccacctgcctcggcctcccaaagtgctgggattacaggcgtgagccactgcacccagcctaattttatatttttagtagaggtggggtttctccatgttggtcaggctggtctcgaactcccgacctcaggtgttctgcccacctcgacctcccaaagtgctgggattacaggcgtgagccactgcacccagcctgtgtcccctttctttaagggtatttcccagaggttgcttctgcttacatcccattggcccagactcagttccatggctacatttagcttcaagggagcctaggaaatgtagcttttattctgggaagtcctgtgttctattacactggaagaagaggagaatggaaattagaaggcccctagcaatctcagccagaatcatatcatcatatcacctactaaattatcttttccctatcagctgatgctttcttttcttttctttttctttctttccttctttctttctttctttctttctttctttctttctttctttctttctttctttctttctttctttctttctttcttttttttttttgagacagagtcttgttctgtcacccaggctggagtgcagtggcacaatctcggctcactgcaaccttcatctcccaggttcaagtgattctcctgcctcagcctcctgagtagctgggactacaggcagcccccaccacacctggctaatttttgtatttttagtagagacggggtttcaccatattagccaggctggtctcgaactcctgatcttgtgatccacctgcctcggcctcccaaagtgctaggattacaggcatgagccaccgtgcccggctgacagtttcttatttaattatttgtttattatgatctattgctgcctctagaacataagcttcatgggggcaggtcctttgccatccttgtctgtagtcatgtcgccagtgcctaggcacagagcctggcaaaggcgggctctacatttttactgaatgaatgattgaacgactccccacaataatgatttgagaatgcattctcgttcccatcttaacaagtggggaaaatgagactcagagaaattaaataacttgcctaaggacagttggcagtagggccaagatttgaaccttgctctctgtggctccagcactctttcaactctttccacttcacatgctggctcccctgatgtctcagctgcaccctggatcaagttagatgccaggaaacatggctgggtgcggtggctcatgcctgtaattcccagcactttgggaggctgaggcagcaggattccttgagctcaggagttcgagaccaacctggacaacatagggagacccccatctctattaaaaaaaaaaaaaaaagaaaagaaaagaaggcaggaggcaatcacctggaatctcttagtgcaatttccccgggaaattccaccccaagttctcactaatatcattcctatagcctctaatgggatcaacataataccttcctgcaaatcaatgggtgaggatgtcacacagaatccatgaaatcaatcctgctggaagtaagtaccggatactgtctgaaactccagatgaactgataggtttctttatttcagacagagaagggccatctaagtcatcaggtttccctttttaccttggctgctaggaaacttcgagttttaagtaagcacccagaacgcagaggcagcctcaacctcaggtaaagtgctgtaatgaacagaatgtatgtgatttggaaccagggagcctaaacttgagtctcagccaatgctcctgtgagcaagacattcaaacttctctggaccttagaaccgaggtgataaacacgtaactcctccgtcccagggctgttaagagggttaagtgagctaatgtattggcaagctctccagaaatgatttgatgctgcataatggtcagactgtgtcacatgcagtcacagggtacagtcagctcacaggggctgagctgtagcttctcatgtcccaggaattattaaacaagagaatgaagtggtcagggaaggcttcaaggaagagacaccttgaaggatgggtggaaccctctgatggagaaaatttgacagcgtcattcctgtaccctgtagtgctgacctcccaggtcacctctaattcccatcctggcctgcatcttcccatccttttaggtaccctctaaccattactaatcccactgtctagtctctgtccccaggggtgaaaatcagcccacgggtggatagagctgccctcagatggctcacaagtttccagagacccaggggttcaaaatgaccaagtcaaccagcagttactattcctttattcgttcaacacctgctcacacggtcgggcatggtggctcatgcctgtaatcccagcccagcactttgggaggccccggcgggtggattgcttgagcccaggagtttaagaccagattgggcaacatggtgaaaccccatttctacaaaaaaatataaaaattagccaggtggggtggtgcatgcctgtagtcccagctactaaggaggctgaggcaggaggatcgcctgggcccaggaggtctagggtgcagtgagccatgatcatgccactgcactctggcctgggtgacagagcaagaccttgtctcaaaacaaaaacaaaaacaccagctcacacaagggtcatcaaagagtgtttagatgcttgaggggatggataccccattctccatgatgtgcttatttcacattgcatgcctgtgtcaaaacacctcatgtaccccttacatgtaccccataaatatatacaattactatgtacccacaaaaattaaaataaaaaaaaggaggctagacgcagtgactcatgcctgtaatcccagcatttttggaggctaaggcgagtggatcacctgaggtcaggagcttgagaccagcatggctaacatcgcaaaatcctgtctctactaaaatacaaaaattagctaggctcggtggcaggcacctgcaatcccagctactcgggagactgaggcaggagaatcgcttaaacctgggaggcagaggttgcggtgagccaaggttgcaccattgcactgcagcctgggcgatgagagtgaaactccatctcaaaaaaataaaaataaaataaaaaataaataaggagagtttagtcttggaaaaagccccagcccaggatgagaggctgaaatctgggctctccccaactagcaacatctgaccctcaacttcctcatccatacaaaagacttaatcacacatcacaaagaccatcctcaataaggggtgctgtctttactgtcagcctgtactcaatcttcctaaaacttgaagaaagtagggtacagagaggtgaagtaaattccccgaggtcacacagctcataagcagcagagctggattgggactggggattcacacactgaaacttgggatgggggtagggaggggaaactctccaggaaatggctcttctcagtcggtgagattttgaggtcaaaccagctggagggagccaggctctggcggggcagcagcagaccggaaaccacagccgactaagactgaccttggcctgtagggctggctgggtagggcggggacggccttggttcccagccctgattcactacgtcattgaagtcggtggctgaagacctcagctctgtctactcaggcttaggtggccgggacgcaggcctggcgtaggggggcgcctggaagggcctgcatgcaggtgcagagaacctgcagggcgtgagacccgcgtagggagagtacctatcctatgtctggggggaatctatgctggggagccctgtggaggaggacctatggccggcggccccctcttccttcccctgaccctgcactcctggctccctcccacttctgacccttccagctgttccatgtggcctcaggataaagttcaagttcctccttctgacctggcccctgctgtgaacttgctctccgtccccagcctgccctactggtcctgtctctgcgcactcccttagcttcattcactttaaaattgagctcaggcctctctgcagtccagcttccactccttcttcgacttggacctggcgtggacgactggccttcctctcctctctcctgaagcccgtcggacctccgccatgcatgcctccccttctgctaggtcctgaggacccacctgtgactcagtcaccctctgctttcagggcagcaggcacacagtggctcagaacaaagggtgatggaggctgactgcctgtggtcactgctggggaagctgcctctgcactgccccagccccgaccaaggcgtgaccctttgaaatacccggaaccacagaacaacctcctctgctgtggggtaaaggtagaggtcgagggtcagccccaggcagcatcccaggtgccatcagagggcccctgatgcttggagccagggtagggaggcgctgtgtctagaagggtgcacttgggctcccctggacaacactggctgtgtgaaaggaaccccagcattaaggaggggttcccccacccctgctatgcactttatttaaagccaaccaaacactgttaaaatatgaatcacgggccagttgcagtggctcacacctgtaatcctagcactttgggaggctgaggtgggcaggtcacttgaagtcgggagttcgaaaccagcctggccaacatggtgaaacccagtctttactaaaaatacaaaaaaattagccgggcgtggtggcacacacctgtaatcccagctactctggaggctgaggcaggagaattgcttaaacccaggaggcggaaattacagtgagctgagatggcaccactgcactccagcctgggcggcagagcaagagtccgtctgaaaataaataaataaataaataaataaataaataaaaagaatcactgcagctgtgaatccacattaacccaaaacagcagcaagtaactggaccacccatactcctggctaggcctgggctggacaatggaagggggagcaggggggtgggtggaggtaaagggaaagtctctcttgcatctgtgcccaatatgcctgcgtgtcctagggtatgtctgtatgacaaggcagcggctggtgtacccaagggggtgaggatggcattgtgggcgatcagctcccatcttccctctggcttgcccctgtcttttttcccctacaaatcccctggttcctggtgcctctcgatggctgacccaaccttcctcagggcaggtagctcctcttctcagtcctggcctcccatccaagcccatgagggccccttccttgctggaaaaactctgtctgtgttagtcctggaggagggaacagatagttcccccagaaaagggccaagcctcccttggggagcagctccagcccttcttggtctgtcctatctgctaagccagatgtttggggcctccacctgacagctgatggcagggtctgtcacagggccagggctatgggtgtgtcccccactgtgtgtgtttggcagggcaggtaggggagcagttaagccaatggctttgagagggtctggtgtcttactagttgtgcgaccttgaataagttcccagaggtctctaaagtcaagttcttcatccttatggccaggcatagtggctcacgcctgtaatcccagcactttgggagaccaaggtgggtggatcacctgaggtcaggagttcgagaccagcctggccaacatggtgaaaccccatctctactaaaaatacaaaaaattagctgggtgtggtggcagctgcctgtaaacctagctacttgagagattgaggcaggagaatcgcttgaacctgggaggcagaggttgcaatgagctgagatctcgcaactgcactccagcctgggcgacagagagagactccgtctcaaaaaaaaaaaaaaacagttcttcatctttaacacccagcctcctagagaggttgtgctgataggaagacgttgcacaggcagcccttagcacagctccatgcacacagttgagtttgataaatagtagcgatcacttttaggagaaaaccccagtgggcatgggggctgctgtgggagtcttccctgtgctgggccctgagaccaggggcctctgccaccttcagaatgctccaggcagggcgttagatgcccaaaggcctggctgatggagcaaaaactctctgggccccaaacccctggccctggcttctcctcctttgtggactttcccaagtaggggacttgagaagcccacccctaatcccagcaggaaggttgagctctggggagacctcacagggaaaaccccagaaatgtctattcctcctctgtgcctcagtctccctgtgtggtgggaagtcaagcggaccctagatgactccactcagactcagctgtccctctgagagcctggagaaggacagggagcccccaagtccaagctccccctcctctggctccttgtttctttctttttgtttttagtgacagggtctggctctgtcacccaggctggagtgcagtggtgcgatcacagctcactgcggcctcgaactcctgggctcaagcgatcctcccatctcagcctgccaagtagctgggactacagccacacaccaccatgctgggctaattgttgttgttgagaccgggtctcccaatattgcatcagctggtctgaaactcatggactcaagtgatcctctcactttggcctcccaaagtgctgggattacaagagtgagccaccactccccagctcctcttgttttttttaggttttttttttttttttttgagacggagtctcactctgtcacccaggctggagtgcagtggtacgttctcgctcactgcaacctctgcctcctgggctcaagtgattctcctgcctcaacctcccaagtagcttggattacaggcatgtgccatgatgcctggctaattttttgtatgtttggtagagaagggtttttgccatgttgtcccggctggtctcgaactcctgacctcaagtgatccacctgcttaggcttcccaaagtgctggaattacaggtgtgagcccccgcgccctgccacctcttgtttctttttgaacagactgtggagcagccagtcaggacccagagccacaggcctgtccctgcactggttaatttcaactggctctgggcccgtggtgttgaaggggccctgggtggggttgggtggggagtagagactggtgtctatggggcccaggcttctatctcagaacccagcgctgtcagctgagagacttgggaggggccaacattaacccatcttgctttggaggaaacatactggttccgatatcagccgtggggtggggcgcggtttccagtctgtgcctcagtttattctttggaaataggaagaatggagtttcctagcctccactttgagaagatgggggaagttggttcatttattcattcaggtagtcaatctacaaacatttattttgaacccactctgcaccacccatgtgtcaggcactgtgctaggcacctgggatacagaagtttgaaaccaaagctgagggacctggaagcctccaagcctaggggagagtaaacacacctaatcctgggtctgtgcagagagaagcagcagcccagagcctgtaggagccattcatgcaccaagttacacatcattttggccagcaaaccccaggaattagtatggatttcctcctgtgatttagcagagaggtaaacatgctggaagcctgtagcaggtgtgtcaatgatgaaatgagccggcggtttggtggctcctgccattccttcttcatctcagtcaggaaggcctggagggtagatgccatgaaggactgccagtagctgtgacgtataaatacctctgtcttctgcctcatctgcccagcaggccctggatttgcaggacctcaccatgggggtgtttgctcacaccaggactcttcgccactggaggccactgaccacactaaatgtggccccacatccagattttaatctctaatacttttccactcaaaggaaataagattcttaggatgataatggattctctgtcttggggtgtgaaaaagaaagtcaggtcctggtgcagtgactcatgcctataatcccagcactttgggaggctgaggtgggaggactgcttgagcctaggaggtcgagaccagctgagcaacatagtgagacactgtctctacaaaaaatttaaaaatcagctgggcttggccgggcgcagtggctcaagcctataatttcagtactctgggaggccgaggtggggggatcacgaggtcaagagatcaagaccatcttggccaacgtggtgaaaccccgtctctactaaaaatacaaaaattagctgggcgtggtggcacgcacctgtagtcccagctactcgggaggctgaggcaggagaatcacttgaacctgggaggtggaggttgcagtgagctgagatcacaccactgcactccagcctggcgatagagcaagactttgtctccaaaaaaaaaaaattagctgggcatgatggtgtgtggctgtagtctcagctacttggaaggcagagagcagaggatctcttgagcctgggaggttgaggctgaagtgagccgtgattgcgccagtgcactccagcctgggcaacagagtgagaccctgtctcaagacaaaaaacagaaaatcagcatgtgacttgaaaatctggttgatcccaggaagcaagaaaactttcaaggatgtcagaggcagtgctgagaagcccattgctggtagtctgagcatcagcaagacagagaattaggctaacctgagataaaccaggaaagcatcagggctacacagacaggagggctcgagggtcaaaacatgcttgtaatcatggacaggcctctgcgggatcagcgggatggggggatggggcatgagatgaaggcaaaaagcaagcaaggacagaagagacacctctactttaaagagagtttgggtccaggtacagtgtctcacgcctgtaatcccagcactttgagaggccaaggtgggcgaatcacttgaggtcaggggttcgagaacagcctggccaacacagcgaaaacccatctctgaaaaatataaaaataagctggtgtgtcccggcatggtggctcacgcctgtaatcccagcactttgggaggctgaggcaggcagatcatgaggtcaagcaattgagaccatcctggccaacaagtgaaaccgcgtctgtactagaaatacaaaaattagctggctgtggtggcttgtatctgtagtcccagatattcgggaggctgaggcaggagaatcgcttgaacccaggaggcggagattgcagtgagtctagatcgcaccactgcactccagcctggcgacagagggagatcctgtctcaaaataaaattaaattaaatcaaaaataaagagagtttggaagtttaccatcacaaagaaaccctcagtttgccagataaccagatttagtatgtttcaaataatttgattggtgtatgctttgtcaattgtttagggtggccaggtgctgtggcttatgcctgtaatcccaacactttgggaggccgagacgggaggatcacttgagcccaggaatttgagaccagcctggccaacatggcaaaaccccatctctacaaaaaatacaaaatattagcttggcatggtggcatgcacctgtggtcccagctaccagggaagctgaggtgggagaattgcttgagcctggggaggtcgaggctgcagtgagccatgattgtgccactgcactcccacctgggtgacagagtgaggccctgtccccaaaaaaaaaaaaaaaaaaattgttgggcgggtgcagtggctcacgcctgtaatcccagcactttgggaggccgaggtgggtggatcgcctgaggtcaggggttcgagaccaacctggccaacatggtggaaccccatctctactaaaaatacaaaaattagctgggtgtggtggcaggtgcctgtaatcccagctactcatgcctcagcctcctgagtagctgggattacaagattacaggcagaagaatcgcttgaaccctagaggcagaggttgcagtgagccgagatcgcaccactgcactctggcctgggcgatagagtgagaccctgtctcaaacaaacaaacaaacaaacaaaaaaccgggcatggtggctcatgcctgtaatctcagcattttgggaagctgaggtgggcacattacaaggtcaagagttcaagaccagcctggccaacatggtgaaacccccgtctctactaagaatacaaaaattagccgggcatggtggcacatgcaggtaatcccagatgctcgggaggctgaggcaggagaatcgctttaacctgggaggcagaggttgcagtgagccgagatcataccactgcactccagcctgggcaacagattgagactccgtctcagaaaaaaaaaaaaactgtttaaggcgtttaaagtgttcagataaatcatccataatttcattacggtgtgtaattgaagcagagtctccagggcccatgggaccgagttaaaaatcccaatgctaacattcaccagctgtgtgaccttgggcaagtcacttcacctctcagggcttcagtttcctcagctgcaaagtgggaaccagatgataataattgaatgtccttcatggggctgttgtgagaattaaatgaagaatacgttcaaagcacttcaaacagtgcttgatgcatagtaaatgcacgatagtattttaattttcattgtttaggtaattcatgttttttaaatataaacatgagtacttttatttattattattttttgagacaaagtctcagtctgtcacccaagctggagtgcagtggcacaatctcagctcactgcaacgtctacctcccgggttcaagtgattctcatgcctcagcctcctgagtagctgggattacaggtgtgcaccaccacacctggttaatttttgtattcttagtagagacagggtttcaccatgttggccaggctggtctcaaactcctgacctcaagtgatctgcccgcctcagcctcccaaagtgctaggattacaggtgtgaagcactgtggccggtctaggtaattcatgtttaatatgttaggaaaaatttaatttgtcgaactcctaagtgttaacttttgcttaggtgaatattaaagagatgttgattgtttaaagagatatcgattatttgataaacccattagcttaataaactgcacatgaaaccaagttttggcaagagtgaggttttctctccattcagtaaacgtccttggatcttgaagaatttaataaatcaccttccctcccccagctccacccatccactgggggctcaggctgttcaataccactccctgccaccctgagtcctccgtcagctaccgacacatacccaggcctctggtctccctccctcagtcgaccgctctccaagaagcccactctccctctactcatgcctcccccaaagcccgagtctgtcctgttaaacccaccggacaatcctcctttacctagagccatggccctatggctctcctccccttcacagctcaactcagagtgacactctcctcttcctccgccaagcctctcccccatctcccctttccatgaagaacctattaatggccacgtctaatgggtgaccccagatccctggctggatttttttttttttttagacagggtctcactctgtcatccaggtgggagtgcagtggcacaatcaacagctcattgcagcctcgacctcctgggctcaagcaatcctcctgtctcattttttcttttttttaaatttttggtagagatgagatctcattatgttgctggtcttgaactcctgggctcaaatgatcctcccacttctgccttccaaagtgctgggagtacgggcatgagccactgtgcccggctcccagctggatttctctgcagcatttgacacacggagcctgtcccttcttggaaatatctgcaccccaggtcctctcctatctctttggtggtttcttctttatcttcctggctagctagtcttcctcctatcacctccccccacgtcggttctcccccaaatccatccctcctgagctatcttctccctccactctgcactttcatagtgcactgtcacaacctggccctcctccagggtggcctatctcagccagttatgccccttccagccattgctcacgccagaaaccaaggagtgactgcaaaacttccgccttatctggccaatcaccaaagggccaaccattggcttccctgtaactggatgaccttctcaagcccaagcgggagcttgccacttcctactaacgttcatatgctgatattcaaattcttctgtctagcttcccgtttcattcctcttctttagtctgttccactattagcccagggcacacagtaggttctcaaatattttttttgtttgagacggagtttcactcttgtcacccaggctggagtgcagtggcgcgatctcagctcactgcaacctccacctcctgggttcaagcaattctcctgcctcagaccccagagtagctgggattacaggcacacgccaccatgcccggctaaatttggtatttttagtagagttggggtttcacatgttggccacgtctcgaactcctggcctcaggtgatccacctgtctcggcctcccaaagtgctgggattacgggcgtgaaccaccatgcccagcctcaaatgtttgttgaatgtgtatgctaaaaggtaatggtaagaagatgacaaaaatatatacgatgcagttcacaatggctaaaggtagaacaattatagaatttaaagtaaaataacactacagtagttcccccttatcttcagagaatatgttccaagacccccagtagttgcctgaaactgtggatagtatggaaccctgtatgtggagagtaaggaaccctatatatattatgtttttttttttttttttttttttgagacagagtctcactttgttgcccaggctggagtgcagtggcacgatctcagctcactgcaacctccgcctcccgggttcaagcgatcctcctgcttcagtcccccatccccagtagctgggattacaggcacatgacaccatgcctggctaagacagggtttcatcatgttggccaggctggtcttgaactcctgacctcaggtgaactctgccttggcctccaaagtgctgggattacaggcatgagccactgcgcctggcctatactgttttttcatatgtacacatacctatgataaagtttaatttataaattaggcacagtaagagattacaacaactaataataagctggaacaattacactgtattaaaagttatatgaatgtggtctctctctctcaaaatatcttattgggctgggcatggtggcttatgcctgtaattccagctactcaggaggatgaggtgggaagacagcttgagcccaaaacttgaagaccagcctgggcaatagaatgagactctatcacttaaagaaaagaagaaaagaaaagaaaaggaaagaaagaaagaggaagaaagagaaagaaaaataactaaagtgttggtaagccacagaatgttagaagatacttataacacatataagtgacaaaaaattaatatctggaccagtgtggtggctcacacccgtaatcccaacaactttggaaggccaaggcaggaggatcccttgagaccagcctaggcaacacagcaagactccatctctacaaaaaaatctaaaaattagcaggatgtggtggtgcttgcctgtagtcccagctatttgggagggttaggtgggagaatcgcttgagcccaggaaatcaaggctgcggtgagctgtgatggtgccactgcactccagcctgggtgacagagggagatcgtctcgaaaaaaattaatatctggaatatacaaagagcatataaagaactactacaaaacaattaaaaaacaaaacaaaacaaaaaacagttcaatagaaaatgacgaaaatactttgaagaggaacttcacagtagagaaaatccaactgaccaataagaatttgattaattttattatttttttagagacagggtctttcttttttttttttttgagacggagcctcgcactgtcgcctaggctggagtgcagtggcacgatctcggctcgatgcaaactctgcctcccaagttcatgccattctcctgcctcagcctcccgagtagctgggactacaggcacctaccactaccacgcctggctaattttttgtatttttagtagagacggggtttcaccgtgttagccaggatggtctcaatctcctgacctcgtgatccgcctgccttggccttccaaagtgctgggattacaggcgtgagccaccgcacctggctgagacggggtctttctatgttgcccaggctggagtgcagtggctattcacaggcgtgatcccactactgatcagcatgggaggtttgacctcctccctttccaccctgggctggttcactccaccttaggcaacctgttggtcccccactcctgggaggtcactatatcgatgctgaacttagtgtggacacccgatctgcatagcgcactacagtccaggacgggcctcaagcaatcctcctgcttcagcctcccaagtagctgggactataggctcacatcacctcacctggctcaataagcatctgaaaaaatagccaatctcattaatatgcatgaatataccaactacagtaaaatgtctaacaacaatattcaaagtcagggacagaagaaatggaagtatactgttataagtttcctttgtaacatctttattgaagtataattcacatgccataaaattcacccatttaaagtgcacaattcagtggcttttattactccccgagttctacaaccactacattctaagtttagagtatttccatcactccaaaaagaaattccatgcccatcagccatcactcctcattcctccctccagccctaggcaaccattaatattgtttctgtctctatagatttgcctattctagacatttcatgtaaataaaatcatacaatataggctgggcgctgtgggtcatgcctgtaatcccagcactttgggaggctgaggtgagcagatcacctgcggtcaggagttcgagaccaggctggccaacatggtgaaacccgtctctactaaaaatacaaaaattagctgggcatagtgataggagcctgtacttccagctacttgggaggctgaggcaggagaatcgcttgaacctgggaggcggacattacagtgagcagagactgtgccactgcactccagcctgggcaacaagaacaaaactccatctcaaaaaaaaaaaaaaaaatcatacaatataggttttttggtggctggcttctttcactaaccatgatattttcaaggtcatccatgttgtagcatgtatcagtatttcattcctttttattgctgaataatattccattgtatgcatataatacattttgttggtccattcatcagctgatggacttttgggttgtctccactttttggctatggtgaatgatgctgcttcagggggtattcctgatgggtctgagcccctggtttccatatccattcagatcatggttttgctgcagttgcccattcagttatcatcactcatggagtcaacacgaggtgaccagtcaatcccctgaggtctagatttattctttctgcacccattatatagcagcaaccctgtctcctcatgataatcagggttgattaccctgccaggagagtagcttctttttattttgtctgctgatctactggcccgaggagctcaaaacgatcataaggcagccatagcttcagttttagtggaatccttactgagtggcctggtagaagcattcccttcacctacccttgggaatcaggatcaccaatcatgatcactagtctaccaaagtataaagtggcaggaggtaaagctggacaccgtggtgcacacctgtagtcccagctactccggaggctgagacaggaggatcacttgagcccaggagttcaagactgttttgtgtgataatcctgctggtaaatagccactgcagttcagcctgggcaacacagcaagcagctgtccctctctatttttttttttttaaaaggcagggctcagtggctcatgcctatgatcccagcactttgggaggccaagggaggaggattgtttgataccaggagtttaaaaccagcctgtgcaccatagtgagaccttgtctctacaaaattaaaaaaaaaaaaaaaaagtagtgtgggtgagaaacatatatttcccagtgggttcctgggaaggatggtgagggggatcactccaacttctattcctaggttcctggaaccatgtattctagctatagcagacacagcaccatataatgaccattagttccaagtagatactgtagctttttttttttgagacagaatcttgctctgccacccaggctggagtgcaatggcgcaatctcaggtcactgcaagctctgtctcccgggtgcggtggctcatacctataatcccagcactttgggaggccaaggcaggaagctcgcttgagcccaggagttcgagaccagcctgggcaacatagcaaaaccctgtctctgcacacacacacacacacacacacacacacacacacacacacaattagccagacacggtggtgtgtgcctgttgtcccagctagttgggaggctgaggtgggaggatcatctgagcccagggaggtcaaggctgcagtgaaccatgatcactccattgcactcctgggcaacagagcgaggtcctgtctcaaaaataaataaataaataaaaataaaaagaagctgaaggacatctactgaccaggctatcttgtccgcccggttgcttagtaccccttctgcaaaggatgctcaccgtggggtaccaatagagacatagtgcaaactttgtgctcactccagcaaatccatccatttgtcctcccctcacaaaaacccgtctcagatcttccagccttgctccttctaggtctctgacctatcagacaagactctggcctctacctagtaatctgtgtatatccttagctcaaagcccttttccttccaccttatgttgctgaccaggtgctaatgtcagcagctctgtcatcaagggggtttcccctcaccactgcctttcagggccacccttgactgtggctgtgatgtggctgaagttcattttcagtccacaccaacctaggaagccattttatctgtaaattagatctggggctttttttcctcctctgtcaactggtgataaagaactccccatgaggccaaaggtgtgagttgagggagagacatagctgcaacagggatacgtgccctgggggtctggctgcctgttcatgtaacttacttgtgcgctttaggctgagtagtcctcatctggaatgcaccatttccatggtaggatggattattgctgcacctgctcaactgtgtcacttggtgtatctgacagttcccgcttcgcaatgggcagctctgatcacatcaccatacctgtccaatggtcaggtctctgcagcacaaccgaagacttctttttttgagacagagacttgttctcttacccaggctggagtgcagtggcacaatctcggctcactgcaacctccacttcctgggttcacgccattctcgtgcctcagcctcccgagtagctgggactacaagcgtgcaccaccacacctgactaatttttgtatttttagtagacagggtttcaccatgttggccaggctggtctcgaactcctgacctcaggtgatcccttgacctcccaaagtgctggcattacaggtgtgagccgatgcacccggccagaagattattttttaaaaccggaacagtcctctgctgtagatggcatggccttgctccagaaccttctgggcttgccagagactccccaaagcatcctatgaatcatagatagatggcatctgctaggctatatgagcccaagtggcagggaactttgcattttggcctggactgaaaaaaacctctcttgttgtgggccccactcaaaaccagcagccttcggagttccctgaaaattagttggagcagtatttccaagtgtggcatgtgccatctcccatatctgaaggggcttgccaggctttgtgcatctttcctagggataggagacacatggtggtgccagttcactggactctgacaaattttgcaaagatccttgagtctttgtaggatttatcctccaacctctggcaagcacgtgccttgccactttctgttcaccaggttccattagctcaatgtcgtcggtacaatggattgtgtgatgttgtgtggaatgccaagatgatcaaggtttctgctctattatgacagaaagcaggacagttaacatagccctggggtaagactgtggatgtggacttttgtctgtcctcagggaaaggaatcggcttttttttttgagactgagtctcgctatgttgcccccgctagagtacagtggctcgatctcggctcactgcaacctccctctcccgggttcaagtgattctcgtgcctcagtctcctgagtagctgggattacaggtacccaccaccacgtctggctaattcctgtatttttagtagagacagggtttcaccatcttggtcaggctggtctcaaactcctgacttcaagtgatctgcctgccttggcctcccaaagtgctggtattacaggcgtgagccaccgagcctggcaggaatctgcttctaatcttacttccttcaacaaattaacagtcatggactaaatggcagggactctgttgatctgttctaagaaagctaacacatctggcacagcactcaatcagggcgccacttggttatgtgcaccctcatctacaatgatccatctggtttttgcaagagccagattgatgaattaaatggggatatcctgggaaccaccacttttatatcctttgtgagtgactccaaccactgccattccacctgggctggggcattgcttctgattaactctcttgggagggagatgaggaagcaatttctaattggcctttcctaccctaatgactcttatttcattctttttttttttggagatggtttcattatgtcacacagggtggagtgcagtggtacaatctcagctcactgcaatcttgacctccctggcttaaccaatcctcccacctcagtgtcctgagtagctgggactacaggagtgtgccacgatacccagctaatttaaaaaaatttttttgtagagatgaggtttcactattttgcccaggctgctctcaaactcctgggctcaagtgatcctcccaccttggcctccacacttgggattacaggtgtggtaatggctcttatttcaggaaaccaacgcgagagatctgctatctactaagtacctctattccactatgtattcaggggccagggaaataaccatcaagcagactgatgggccagatctcctttcatcacctggcctccatatgccccacactaatacatgcccatgatggcattttggttccttaatattagtgtcagttccaactctgtatccaaaagccttgaaagatctgagtatttccctttccccaggatgcagttgctctgataagcagctgtaagtacctttgggggaagaataggataattaccatgatataaacttgccatggcattgtaggattcttcctgaagggaactggcccccacttcaatgaaagggctctatatttggccacgtttggtggctcacatgtgtaatcccagcactttgggaggccgaggtggcacatcacttgaggtgaggagttcgagaccagcctggccaacatggtgaaaccccgtctctactaaaaatacaaaaaattagctaggtgtggtggcgagcacctgtaatcccagctacttgggaggctgaggcaggagaaccgcttgaacctgggaggtggaggttacagtgagccaagattgcaccactgcactccagcctgggtgacagagcaagactccatctcaaaaaaaaaaaaaaaaaaaaaaaagacaaagggctctatatctgaaaactggtttgggcctggaaactgggtatgggatggggattttcctttgcagtggctaacttcagccttctgctgtctcattcttgcttgtttttataagcaagagataccctccttcaccatcctcctatctgggaacaccatggtctcttggtcatcacaatagatccctgcttacatttctggtctttctgcctattacggtaattatgtccacttagcctctcatgaccacgtgctgtcgcctgacctcgttctggactcctgttatacccactgactctagaaaggctagtcccatagcagctcccgctaccattgctctggcctgctgaggacagctaccactgacctgcaaatgccagtggccctgttccaactagcaccttttgtatcactttatttattgagtatttctgggccctcatgaagaacacagtaggctggagggttctatagtcttatataatagtcattttattctggcatgcccacttttctgagcctttattcttccaagtattctgtcaaggaagttccaacatctctacctcatttgctggaactcatagtttttccacactttgaagatctatcccgggggcatattgcaacaggcttctggtgtccttgccaagctttaaaatgttaaatcccaggccaggcgtgatggctcactcctgtaatctcagcactttgggaggccaaggcagatggatcacttgaggtcatgagtttgagaccagactggtcaacatggtgaaaacccgtctctactaaaaatacaaaaattagcccggtatggtggtgtgcacctgtaatcccagctactcgggaggctgaggcaggagaattgcttgaactcaggaggcggaggttgcagtgagcctagatcgcaccattgcactccagcctgggttacagagcaagactcatctcaaaataaataataaataaataaataaataaataaataaataaataataaataaaataaaataaaatgttaaatccttaccaggtagggcattccatatcaataaacgtacccttattcagcattttttttttttttctgagacggagtcttactctgttacccaggctggagtgcagtggtgcgatctagactcactgccaacctccactgcccgggttcaagggacttttgtgcctcagcctcctgagtagctgggagtacaggcacacgccaccaggcccagctaatttttttgtatttttagtagagatggggtttcaccatgttggccatgctgttctcgaattcctgacctcaggtgatcctcccgcctcagtctcccaaagtgctgggattacaggaatgagccacccgacccggccttactcagccttatattccaccccctgaccccagtctaacaccctcaagatatgttcccaaacatgttctgccaaattcttctggtaaatgttcaccagctcctgcaggtcttttggtgaatcatccttttctttccatagatgggacagtgcttccccacttggtccctgatgagacttgaccattgttattggtctagagtcatggaggggagtcaacatcaggctttgaagagggcaagtatcatcttgtgaggcgtctgcctcaggtgaggaatctgcatgttatctaggcaaggggaggctgctctcttccacccagggggagaggccaattctgccagcccaaataactcagcataataagggggttttagaacagatgttcccataccaggcctcaggatcccactccttccctcccagggccctgacctgctggggctttaaatataaaaccctgctactcttgcaatcagattataggactgattttcatcacagtctgccctgcacaggaggtgagggtttccttacatgctgccatagaggtcttctggtttttgttttgttttaagatagggtcttgctctgtcgcccaggctggaatgcaatggcacaatcatggctcactgcagcctcaacctcctgggctcaagtgatcctcccacctcagccttctgaatagctgggaacacaggtgctcaccaccatacccagataatttattttttgtagagacagggtattcctatgttgctggggcttgtctcgaactcctgggctcaagtgatcctcccaaagtgctgggattacaggtgtgagcccggcttcttctagcttttaactatatcataaattgatagctggctgatgtgagtctgtcttttattcttttaaccctttgatggcattaacagcaaccaaacaactccttttttttttttttttgatgacagagtgagactctgtcatccaggcaggagtgcagtggcgcaatctcagctcactgcagcctctgccttgtggcttcaagtgattctcgtgcctcagcttccctagtagctgagattacaggtgcctgccaccacacccagctaatttttgtatttttagtagagacagggtttgccatgttggccaggctggtcacgaactcctgacctcaagtcattcacccgccttggcctcccaaactgctgggattacaggcatgaaccactgagcccagtctccacagtccttataattaccattttcctcttacacctcaaatactagagctattgcataggcagtgcatccctgtctgcatcccatttcaccagggtgacagtctgacgatcagtccagttctccagtgggtattagtaccccacttacctcagcaatggaatctttgggccatctggatgatgagtgatccaaaaccagaatcttatcctgggggtctacttcctaggacaactttggatatcaaatgtgttggtttgggttccctccagaagtagaacctgagtcaaggattcaaaggaaagtatttatttgagaaacacaagtgtttatttgaaaagcgatgctaggaataccaagcaagccagtgggagactgacattggaaagaaaggaggctcataaagggtgtgttatcaagcaagttaaaaacatggacaaccggccgggtgcggtggctcacacctgtaatcccagcactttgggaggccaaggcaggtggatcacctgaggtcgggagttcgagaccagcctaaccgacatagagaaaccccgtttctactaaaaatacaaaattagccgagcgtggtggcacatggctataatcccagctacttgggaggctgaggcaggggaattgcttgaacccaggaggcggaggttgcagtgagccaagattgcaccattgcactccagcctgggcaacaagagtgagactctgtctcaaaaacaaacaaaacaacaacaacaaaacaaacaaacaaacaaacaaaacacgtggacaaccagagcttaatcctaagaaggaactcagggagccagtcataatgtttgctgcaggacctgagggatgaggaagctggctatttacgcaccgatccccatcggtgattggctgaaggttgctgtggctgggagtataattccccagaactttcagcctgctcagcaggctccagtggccagagagagtccttagataaagagctgcaggttctggcagctggaagttcatccagtgaacccaagagcttcaggaacatgggagggcactgccagcatctgccacactaagggaggaatcctttcacgaggagatactgcaatggttccactacctggaagataaggctctcacctgagctcagggcaaaaaaggggttaccttctgggatgactgatcccaaatgccaagggtaagctgggttctaactccaaaagaaaggcagggaggactatgtctggaacccaggggactccctggtgtgccatgtcctatttccgtgtccaatagtaaaagttaaaaaaaaaagagcaatacagttctgaggattccaatttgtagaatgctaatttcaagaataaaggtttattcttgaaacctttattttaagaataaaggtttgggggccgggcgtggtggctcatgcctgtaatcccagcattttgggaggccaagatgggcggatcaccaggtcaggggtttgagaccagcctggccaagagaccagcctggccaatatggtgcaaccttctctctactaaaaatacaaaaattagccgggcatggtcgtgggcgcctgtaaatccagctactcaggaggctgaggcaggagaattgcttgaacccgggagacggaggttgcattgagctgagatcgcgccactgcactccagcctgggtgacagagcgagactccgtctcaaaaaaaaaaacaacaataataataataacaataataaaaataaagaatacagatttggggccaggcacggtggctcacgcctgtaatcccagcactttgggaggcaaggtgggtggggatcacttgaggtcaggagttcgagaccagtctggccaaaatggtgaaaccctgtctctactaaaaaaaatacaaaaattagccaggtgtggtggttggtgggcacccgtattcccagctactctggaggctgaggcacgagaatcccttgaacccttcaagggtaatggaagaggaaagttataatatcagcttctgaccagatatagaagcaaggattgtagaagccatgggcatgttttctcttgcttgttttgttatatacactctttaaatattggttaactttcctctccttcttttctcttattttttatgaggattgttgttggtgatgaccttcataatttaggttgcagaatactctagaggacatgtggctgaactaggagaattcacatcacacggaaagggatcccattgctgtagagactttgcgtctctgcttttgggggagggccccagagcatcttcatttgagcaaaggacagttgcatctattaggcaaagggatgaagctgttattattcaaatatgatggatagatgtgtaactactgcatagaaaaaaggggtagataatgccagttatttgcttattgactttcagcttcaaattcattcttattttctctgctctctgatgttggaagggggctgggactctgcaaaccagttccctagcctccattactgtcctgttaggttctgcttgtaggcggtgcacacatgggtgataaaaatataaagaaaagcaaggaaatgattatcacaaaagttgaaatatgaacaaggaataaagctggaggacttatacttcctgattttaaaactcactgcaaagctacattcatcaaaatagagtggtattggcatagagacagacgtatagaccaatgaaatagaacagaggccctcatgtaaactcttacacacatgagcaagtgatttcttttctttttttttttgagacggggtctcgctctgtcacccaggctggagtgaagtgatacaatttcagctcactccaatctctgcctcctggactcaagcgatcctcccacctcagcttcctgagtagctgggaccacaggtgtaagccaccatgcctgcctaatttttttgtattttgggtagagatggggtttcaccacgttgcccaggctggtctcgaactcctgagttcaagtgatccgcccacttaggcctctcaaagtgctggattacaggcgtgaaccactgtgcctggtctgcaagtgatttcttattttttttatttatctaatttttttagagatatggtcttgctatgttacccaggatggactcgaattcctgggctcaagtgatcttcccacctcaccctcctgagtagctcggattataagtatgtaccatcacacctggcctatgatcaaatgattttttttttttttgacatagggtcttgctctgttgtctaggctgcagtgctgtggtgcaatgcagtcttaaacttgatcagaccaggtgcggtggctcatgcctgtaatcccagcacattgggaggctgaggcgggtggatcacctgaggtcaggagttcgagaccagcctggccaacatggtgaaaccccgtctctgttaaaaataaaaaagttagccgggcgtggtggtgcacacctgtaatctcagctacttgggaggctgaggcaagagaatctggaaggtggaggttgcaatgagccgagatcatgccactgcactccagcctgatttttgacaagaatgccaagaccatttaatggggaaaggacaggtttttgtttgtttgatttttgttttttaaacaaatagtgctggaaaaaacggatatccacatgtaagagaataaagttggactcttacctaacactatcgacaaaaattaactcaaaatggatcaaatacctaaatgtaagacctaaacttttaaaactcttagaagaaaacatatggcaaaagcttcccaacactggatttggcaataatttttttggatctgacaccaaagatgggggcaacaataacaacaaaatagacaaattagctttgatgaaaacttaagaactttgtgcatcaaaaaaccaatatcaacaaattcaaaaggtaattggcagaatgggagaaaatatttgcaagttatatatctgataaggaattgatatccaggatatagaggcagctcctaaaaaactcaacaccaacaacaaaaaccaagcaacccaaaaatgaacaaaggacttgaataggtatcgctccaaaaaaaaaaaaaaaaaaagaaaacaaatagccagtaaacacatgaaaaggtgctcaacatcactaatcgttagcaaaatgcaaataaaaactacaacaaaagagtgtactttcagggatcatttccctttttctgtttcttgagatggagcctcattctgttgcccaaactggagtgcagtggcgcgatctcggctcactgcaacctctgtctcctgggattcaagtgattctcccacctcggccttctgagtagctgggattataggcatccaccaccatgccttgctcatttttgtatttttagtagagacggggtttcaccatgttggccaggctggtctcgaactcctgatctcaagtgatccacctgcctcggccttccaaagtgcggggattacaggtgtgaaccaccgtccccagcccgtttctctctgtcttttttttttttttgaaacaggctttcgctttgtcactgaggctgaagtacagtggcgtgatcatggcgcactgcagtctcaacctccggggctcaagtgatcttcccatctcagccttccaagtagctggggaatccaggtgcacaccactacgcctggctaatttttgtattttttgtagagatggggtctctcccatgggcacagtctcattgtttctatagtttattaccagaaaagtttctcagaatgtgtagagcactggaaaccatgaggaagaggcatagcgttctctcttgagcatcaagttggctgttggtgttgctttgctgcaaacgccatttgtcattgtcttccttgtcttcctttaggagagtaagagggagaggacacagtctgggtagtttccctgaaaaaaagaaaaaagaaaagaaaactacaatgagataccacctcacacttgttcacacttgttgggatggttaccatcaaacaagcaaacaggaaataacaagtgttggcaaggatgtagagaaattacacccttgtggccgggcgtggtggctcacgcctgtaatcccagcactttgggaggtcgagctgggcagatcacgaggtcaggagatcgagaccatcctggctaacacagtgaaaccctgtctctactaaaaatacaagaaaatagccaggcatggtggcgggtgcctctagtcccagctactcaggaggctgaggcaggagaatggtgtgaacccgggaggcggagcttgcagtgagctgagatcgcgccactgcactgcagcctgggagacagcgagactccgtctcaaaaaaaaaaaaaaaaaaagagaaattggacccttgtgcactgttggcaggaatgtaaaagggtgcagccatatggaaaacaggatggcagcttctcaaaaaattaaaaacaaaattgccatgtaatccagcaattccacttctgggtatataccccaaagaattgaaaacaaggtctcaaagagatatttgtacacccatgtgcatagcagcattactcataattggtaacatgtgtaaacaatacaagtgtccatggatggatgaatggataagtgtcttagttgctttgtgctgctctaacagaatatgtgagactgggtaatttatgaagaacagagatttgtctcttacagttctggaggctagctgggaagtccaagatggaggggcccacatctggcaagggccttcttgctgcatcatccaatggtggtaggtggaaaggcaagagagcatgagggagagagaaaggggcctgatcctcaacctcttatcaggaacccactatcaaaacaacagcattaatccattcatgagggcagagctcttgtgatctaatcatttcttgaaggtcccacctttcaacaccagtgaattggggactaagtttcttatacatggccacgtgtggtagctcatatctgtaatcccaacactttgggaggctgaggaggaaggatcacttgtgcccaggaattcaaggccagcctgggcaacatagtgagacttcatctctacaaaataaattaataaataataaactaataaaaataaaaattagccagacatggtagcaagtgcctgtagttccagctgcttaggaggttgaggtgggaggatcacttgagcctaggaggttgaaggtgcagtgagctatgattgcaccactgctctctagcgtgggcaagagagtgagatcttgtctcaaaaagtaagaaagaaggctgggcatgaagacttacgcctgtaatcgcagcattttgggaggccaaggcaggtggactgcttgaggccaggagttcaagaccagcctggccaacatagcaaaactccatctctactaaaaatacaaaatttagccatgcatggtggtgtgcacctctaatcccagctactcgtgatgctgaggcacaagaatcacttcaacctgggaggcagaggctgcagtgagccaagatcatgccactgcactccagcctgggcaacagagcaagactttgtccccccccaccaaaaaaaagaaaaaaagtttccaacacatgaacttcgggggacacattcaagccatagcaataagcaaaatgttgcatattcctacaaaagaatattagtctgcctttaaaaggagagaaattctgcaatgtgttacaatatggatgagcttttttcttttctttctattttttttttttttttgagacagagtttcactcttgcccaggcttcagtgcaatggcacaatctcacttcactgcaacctccgcctcctgggttcaagcgattctcccgcctcagcctcctgagtagctgggattacaagcgtgtgccaccatgcctggcgaatttttgtattgttagtagagacggggtttcaccactttggccaggctggtcttgaactcctgacctcgggtgatccgcccacctcagcctcccaaagtgctgggattacaggcgtgagccactgtggccagcaacatagatgaactttaaggactttaggctaagcaaaataagccagtcacataaaaaataagcactatatgattccacttatatgaagtacttagagtagtcaaaatcatagaaccagaaagtagactagtagttgccaggggtgaggggagtggggaatggggaattattgtttaatggatagtttcagtttttcaagatgaagagttaagaagttggacggtggtgatgactgcaaaaaactatgaatgtacttagtactactccattgtacacttaagaatggttaagataggccgggcgtggtggctcacgcctgtaatcccagcactttgggaggccaaggcaggtggatcacctgaggtcgggagtttgagaccagcctgactgacatggtgaaaccctgtctttagtaaaaatacaaaaattaaccaggcgtggtggtgcatgcctgtaatcccagctacttgggaggctgaggcaggagaatcacttgaacccgacaggtggaggttgtagtgagccgagatcactctggcctggacgacagagtgagactctgtctcaaaaacaacaacaacaacaacaacaacaacaaaataaaccccaaaagaacatcatgtgccctcatttggagaaagagcaaaaaaacccatcatgactgcccctggcaaactggaggcaggagaatggtaagagggacttctacacgtgaggcaagagcaagatgatggaggagggactgaaaagaccaaggttatactaacatcggaatgtgttaatatgctaaaaaattggaaagatacagagaagattagcatggccactgtgcaaggatgacacacaaaaaataattgaaaaaaaaaagtaaaaaataaaaagaccaaggttgaggtcccagaagccaagaattgaggctgaggctgcgtaaatgtaagatcccatgctaggagtcaggatctctcaccagtctccagggtgtcagacaaggctctttcatctcctcttcctccacctgtggtgacagagggtccctgcctgctgaccattttcagatgtgggtgcaaatctgaatcaatgtagagacatcagcaatccactggcagagcatcaggtgaattgagcaggtaggcagagttggagaataggtgtgagtgagtcctgggagggatgttcctaagggcagatggagaaattgggtagaggccctttaataaacacagaaaggctttatgtaggagttgcggattccagcaggtgaaggggaaccctccccccaccccgccccgaaaatcctggaacaggttgaatagaggaacggagcaggtgggagcagggacgtgagaggaataggaggccaagggcggtgggaaaccagactatgccttcatttccccccacccccggggagaagctgcaaccagttttacaggacactcctggccttgcccgagatcaatgaccccattcagagagggttgatggcacaacgcggcaatgccggcagccaaggggttaaccttaggccagctggctctggggtggtgcgagggggtgggccgccaccccctccggttgccttggcaccattgtaggcgcctgctctgctgctgggaacctccgcagagcccaaggcccttcgttgccagtctgctccccactctctgtcccaagtggttccaggcgctgagcccttaggcttcgtctggattcccatcctccaccccaggagaggttggctcggcctggctggtgcaggcgggtccagcccaggcacagacatgcagatgcgcagtctctagggctgctccttagcctcctgggttagcagccgggagccatctgcgctttctcgccgagaaagccgaggctgaacggatagggggcagggaggggacgggggtggggggtgggggtcccggaggtgaagacctcctttcccctggcggcagggggagatcagagacaccacggagcacaggtcagaaacaagggagtagagaggtcggagccagagactcgaggcgaggcgaggcgaggaggagcgaggagtctcgggcccagagtgtgggggtggagggcaggccccctgctcctccttccaatctctgcttctcccgggtaccccctccgccctccgtggggcccgggctctgcccctcccctcagaccctgcaccctctgcggattggtcctcggcctgctggggggcggggcccgagggccctgacgtcactggccgaggggggcgggcggctggaggagggggtgacggggccccggctcagcacctcggagagctccctccccggccttgttttgctctggcatcgccgccgggggagggagcgagggggccgggcaccgggcgcaaaggcagggggatggccatggaagggttgaggggccccgtcggacagagggcccagccgtgatccagcgacgggtttggggctccgggaggggtgggggggcagcgggcggcggcagcagtggccgcacatctggatggaagcgagctttgtccagaccaccatggctctggggctgtcctccaagaaagcgtcctctcgcaacgtggctgtggagcgtaagaacctgatcaccgtgtgcaggtgggcaccgctagtgggcgggggctggggtggtgagggagaggggttggggtggactgcggaaacccggactgagcgctgccgcggagaaaagggaggggagaaaagggtcgagaataatgcgtccactgtccctcccaggcccagaacccagagggaggctgcagtctggtccctacccttctaggccaagccaagcctatgcccgggcctgggcctggggggtgaggggtgtttaattggtactgtagcttcctgtgagaaccaggaagtgacactgtgtgagggggaagggggtggggatggctggctcccttgctgggaatggggcaggatggacagaggggaccccgtggggggatgaatgccctccaagcataccctcattgacacccatgtcaaactgacctctctggggtggggttctccaatgctcagattctggagcagggatgggcagggtcaattgggcatggggtcagagcccatgaatccttccagggaagggtgaggggcaccacccaagacgtgggaaggaccaagagcctgggttccaggttcaaggggagaagatcgggaggacagggccactggtctctgagggtggaacggttgcagggttgggaagattctccgtgattgcggggcccaggaagtgatcctgttcacttcaacctgcagtgactcaccctccctgccctgccctgtcccaaaaccagggcatggccagctgctcagccactccccctgcagcccacacctgcactctcctctggtgctgggatcccctgtcagctgcaacctcccctggcccccatgcctatcaggtgttgccccctcagtgcagggtgctcctgggggcagggctcactcttccctcgccagccccacctgcctgccacataggcctcagctctgctgaagcccacctgatgccctgaggcccactagtgcccacctgatgccctggctcctggctcccatagctccttcccggttcctgggcacgcactccaccacactgcatctgtctcccagcactagtgcccagcacagtgctgtgcacatcagacctctgcagaaatgcctggaactttaaggaaggagagagtgtagcaatggcccagcccacagtgcagggcactgcctttaccctcatttcccccaacccctgccagtgtgttataaaacaaagatttctgtccttggggccagaaggtcctaggttcaagctcttactccatcagctttagctgcgccaccttggggaggtctcttaaccactctgggccttgggtgccccatcatccccattttagatgtcacagccacaccaaagaatgaaaatggcaccatccatgtaggagcctagctcagtgtctggcacacagaaagagccctgtcctaatgacgctcttcctgtccctctctgctgtctacctgctaggttcctctttttctcttgcctgccaaggtagctgagcctcttgagtacatggggggaatgagggaactctccttgacataggccagagaaggagaagttgaagggctgaaggtggtttagagctgggagggaaggatagagttttggggggtcagggacataacaaaggctcagtaacccccaggcccctactgcctcatcactgtcacatggtttgcctccagctcccagaacagctccctttagcaggccatgggctcccctgggccctggcctccctgtctccatggtaacctgcagcagccactgcatctcctatcagggagcacaccacagggctcccgggggcaatgaccacctctgcggcacccctgaggacagataccatatggctgccatgctgaacccagtccaggccccatcatggtctgacccagatgaccaggggaaatcaagctggcaggagggtgcgcatagtgaagctggaataatgccccaaacacaggctggctctcagcagggccagccttcccagccacgaccccgctcctcaccatccctgcccagcggccctaggcacctaccttctcccaaccctgcctgggctctcaaccaaaatgtaatgaggcaggtacgattgttcccatttgcatttgacaagaagggactcacagaggggcccaaggccacgtgagtgccacagggaaacaggatttgaatccagcaggctgcctccctctagtgcaaccccaagactgacctggctctgatctcaaggcagttcaactccaagttcaaaaggaagggggacgagggctcagctgtgcaattggcctgagagcctcagaggtcagtggtccaaggctggagacttgcagagtagaggacaaagggcggtggagcaggggctgctccaggccttggtcatcacaacagctgccaggaggccacagatgtagcagaaagagcagaagcttcagaatcagaatcagacatacctgcttgactactcataagccatgtgactccgaacagatcagtcaacctcttggaccatcaatttctttacctgtaaaatggggatgagagtaatactaagaggacctacctttcagggctgagcatgggtaagggaatgcatgcaaagtactgtgcttgccacattatagggcttgataaatataagaagaaaaggacatttccaagcagctcccatttccctggacaccccgcccctgctctgccacccacagcagggaaatcatgggatgttaggaactgtgtcctcatccctgccctactccattgcagggatggcagggggagattgcaggggtagtgactgcagagggagcctgaggcttagacaggactggagagggggcactgcatggcttcagtccttcagccccacaggcttcccttagtcccttcctcccaaagaagccaggcccccaagccccttccagggatctgctgccaatgccccctcctgcccagtgtctgtgtcaggcccataccccgcacctccccaccccacccccgcccagctctgcactgcctggttctgggcagctggtgtgtgggaggccaagccgggaaggaaaggggggaagggggtatctgtgtactgggagcccacctggccacctgcgcatgcccacactccatgtgcacagtgccaactcacatgccctggtacaggtgacccccatccccaaaagggactgaaggttgctccagcaatcacagaagacagctcaggtggggcacacactggcttctaacacctagttgacccaggcctcgcacacacagaccctgaagggtggtctatggggaaggggctcctggaccgcccccggcttgtgcctcatcttcctattttttcagtccctctcaccccttgctcccgaagcttcctttctctggctgtcacctctcctgtcacccactttgtcaatcagtctcccacctgtcacccttcctccccatctgccaccctctcactccacatgacacggtacctctatggtcactgtagtcttgcctgtctccccactcgctctgccccccaccacatccatgcccttcctgacctttcttctctgccggttgctccctgtctctccctccatcacctgtttcctcacctgacaccccactgccccatctccccacctcgccgcccaggttctctgtgaaaacgctgctggagaagtacacagcggagcccatcgatgactcatcggaggagtttgtcaattttgcagccattttagagcagatcctcagccaccgcttcaaaggtgggcccagcgcccctcccccagcggtccctcccccagcgcccctcccccagtggtccctcccccagcgcccctcccccagcggtccctccccaactcccaacctttagctcccagccacctctttctgatatactccatggactctgaaccccctcattgaccctggcccccattctgggccatgcacagaagcttgtgtacagatctgggaagagggagaggcctttggcctacaatccccatcatgggcaagcgatatgctggggtgcccactgcacacgtgcatgtgtgtgcacagatctttgtgggaggaggctgcttatgcttatgcatgtgagtgcctcactacatggaccctctccaaactccctggtcttgctgagccccctccctgccctggctcagcctgtgccccagcaggtccagtgagctggttcagctcagacgggcagcggggcttttgggactatatccggctggcctgcagcaaagtgcccaacaactgtgtgagcagcatcgagaacatggagaacatcagcacagcccgggccaaggtgaggggcctgaagcaagcaactgctctctgctctggacacagggggcctgcctgtttcttggtttttgccccctgtgcacagcccaggggagaagggcccacacctgatgctggacacatgagtccctctggggcagcaagtaaaggtgaacatgatttccagggccgggcatggatccgggtggcactgatggagaagcgcatgtcagaatacatcaccacggctctgcgtgacacccggaccaccaggtcagacttcccaggcaactcagaccacaggtctcagagtgcacctgcattgcccaaacacagctgatccttaagttcctgcagcatccttcagttcctggactacaagtcccagcaccagcacacatggctgatttccctcttccagcctggcctgcagtcccaggacgaactcttttttttttttttttttttgagaaggagtttcgctcttgttgcccaggctggagtgcgatggcgcgatctcggctcactgcaacctccgcctcctgggttcaagcgattctcctgcctcagcctcctgagtagctgggattacaggcatacgccaccatgcccagctaattttgtatttttagtttctccatgttggtcaggctggtctcaaactcccaacctcaggtgatcctcccgccttggcctcccaaagtgctgggattacaggcatgagccaccgctcctggccccaggacaaacttttaccaccaccaccaccaccacttgcaagtcaaatctaatgcccattatttgccatcaatgcccagcacgctccacccttgcacacctctggatgagcctcagccatgcaccatctcaagtgttggcttgctccatgatctacaacacagcccttctgtctctccaaacaacgaaagcagttctgtacttgctattcacggacacagagtccttatatggggagttcaatccctgcactgtgggttcacagggaggttgggtgcctgaggcaaggggttacaaggaggagtgtgcctgtgtgggcaggtgcatctgaagctgtctgggtgtggcggggggcatatacctccccatcccaattggccatacccagcctgatgtttttactgaattccattcctcagtctacacgtttcaagttaacacgttttttgcgcacctactgtataccaagcactaatgattaagacttgcttcctgatatgaaggatctgggtaacccagtacttgatgaggaaggggtagctcagagggaggagtcggctcagggaacacccattctaggtgatggggccacaggtgcgagccccaggctgaagggggagagaggctccaggcctgcgtgcagatcaggaaggagaattggccttccttcaggatggggtggcagtaagccaacaatagcagctctggggggggggggggcgctccaggggcctgctgcatcctctggccctctgcctccccacagacggttctatgactctggagccatcatgctgcgggatgaagccaccatcctcaccggaatgctgatcggactgagcgccatcgacttcaggtggggtctgcctgacggcagtggtggagggggctgtttcccccataaatgtcctaccccaacccctcacacccacctccaaccctgtggctcctctgcctcagcttctgtctaaagggggaagtcctggacgggaagacccccgtggtcatcgattacacgccctacctaaagttcacgcagaggtgagcggctccatgactgcggcggggcgggggacggggcctcgggacatcctggggacgtcctggtcccaccgccctcagcggccagcgcagacgcgcggggggaggggcgggaccggccgtgcccactgctccctctcccaagctacgactacctgacggacgaggaggagcggcacagcgccgagagcagcacgagcgaggacaactcgcccgagcacccgtacctcccgctcgtcaccgatgaggacagctggtacagcaagtggcacaagatggagcagaagttccgcatcgtctacgcgcagaaggtgcgcgacgccggcgggcccggggggcgggcgggccgggcgggggatccgggcatcccggggcggggcggggatgggggccgcggccgggacgtcctcccagccgcccgggctgagccggcgccccgcagggctacctggaggagctggtgcgtctgcgcgagtcgcagctgaaggacctggaggcggagaaccggcggcttcagctgcagctggaggaggcggcggcgcagaaccagcgcgagaaacgggagctggaaggcgtgatcctggagctgcaggagcagctgtgagcgcacggcctgccctaacccctgacccccgccgccccgaccacatcaccgggtgaaccccatcttcacttccatcgactctaacatcacccgacacgagcacccacctctccagcatcaaccctctgatccagccagccccaccccgagatgcccacaatgatcttctaacattgcccccagcataagatccagtgacttccaacagccagagcccacccttcaccttcagttatcttccgctagagtggccatccaaccttactgcagggaccccacgtcactcacaaggacctgcggtgttgctctgcaaccttcaacacgattgcattcatcgcctcactcacctgcaccacaggctcactgaccgtcatcatccgccgtgacccccgacctcacccctgccgatccctgtaacacttcttctctacgcctttccaccaccctgatcttgcggcaagatccccaagacgatcttacacttcagggattcccacactatcctccactgacgtccccatcaccccagctgaccccaacaacactgcaccattccctccaactcccaatatttgtgcacgaatccctgtcacccctccaccccagtaccacctccacttcctcccgggatctggcccactgaccccaacaccgtatccccatttttgccgctcagatttcattcctgacccctccctcatccccttgctgaatctcccttcctcacttctcctacttccagccaggcctgactcctcctccccctcccaggacaggtctgatccccagtgaccacgcccctctggcccagggttccaaggagctcactacacccctggtcaatcaatggccctcactgggaacgcttaatggggccgagggcgccagcaactccaagctctaccggaggtaagccccagccaggtggggcttgggcctgagagcgggtcgtcctggggaagaagggcttcctctaccggcgcaccagctctcgctctgccgcagacacagcttcatgagcacggagccgctgtcagctgaagccagtctgagctcggactcccagcgcctgggagagggcacgcgggacgaggagccctggggtcccatcggtgagctcccccaacccaacacccagtacccctccagaaagggctgaggcaaggccctgaggcctcaaggcatgtcctcattcattctcttagtcttttttttttttttttttttgagacggagtctcactctgtcatccaagttggagtgcagtggcgcaatctcagctcattgcaacctctgcctcccgggttcaagggattcccttgcctcagcctcccgagtagctgggattaaaagcgcctgccaccacgcgcagctaatttgtgtatttttagtagagacgcgcggctaatttgtgtatttttagtagagacggagtttcgccaggctggtctcgaactcctgacctcaagtgattcacccaccttggcctcccaaagtgctgggattacaggtgtgagccactgtgcccggcctctctcagcctttcttgagggtttagcacagcaatcgagagcttactttgaggtggcagaacacagcatatgcagaacccagcataaatctggctgtgcctcctctgaccatgtgagcttggtcaatcactttacctccatgagtctattctttgtaaatggggatgttgataatcaccaatgttgtcacatggtgagggctcagtggttttttagtgtcatgacatcctcgggggctcacaaactctcggggaactccttagactaatttgctcttatctcatgcacactgtgaactacttgcctgaccattgtttcccccttctctttggctgccaggaagctcagagccaaattagtggctcccttcgagcgaatgcccaggacttcaacgcatgcactttgtgttgacctcatccctggcttcaccttggtttttcccatcctagttctccctatgcctgaatatcctgtcttttcttttttataagcaaccacactgtattggatgaccctagatcttctttgagacaaggcaggctgtggccatgtagccccatcacactgtgtttgtgattgtctgtgtgtctgtctcccccaccagactgtgagctccatgagggcagggaccgtgtcttgtccgttctctgtatccccagtgcttggaacagagcgagtgctcactgtgtatttaataaatggacaaagagagaggatgaccctcacggggagacagagacatcaactgacgattacaatacagtgtccccagcacggtgcctggcacaggcaggtgcttaaccaaagtttaactgaaaatggcaaatgctgtggaatatgccaaggtctcctggggggtgacttgagggctgccccttcactgcccacccctctaccaactcccacacatgtagactggtcgcttggcctcacctgccctctctccccagggaaggaccccacgccctccatgctgggcctctgcggctccctggcctccattcccagctgcaagtccctggcgagcttcaaatccaacgagtgcctggtgagcgacagtcccgagggcagcccagcactgagccccagctgaggaacagcatgggcagtgccagccccacctgccaggggccatggacacctgccacctttcttcaacaagagtcccccaatccaggctacccttccagagaacgctacccacccagccagggttctctcggggaagatctcgtctgctcaccttagctttctgccttggcagcacgggctgcggaagaaagcacgctgggccaggaggcaggggtgcccaagccacagggagcccctggggaagcctgctccattcttctggtgaccttggcgctccttcactcatctcccctgccccctcaggaactggtggcccagcttccacacccccacctcccagtctctagcctctccatctgtctgtgtatggcctggagtcactccttcctcagcccccagggcaagagagctcaaataaaaaccagaggactgagggcagccttgtatgtggggggctggggaagggccccgtcctgaggtctgaaggaagtggagtcagtgcctgaccgaagaccaaggtcaggcagcactagcatgtgccctgtggggacaggcaggccagcactcagggagggggtagcttctgtgtccaaaatattaggtctgcctagggcaggcccaagacatgcaactgccccccaacccaacagcctttaagaacttgctcaaaaccaggctgaggcggccgagcacgccaggggcaggatggaggcacaccctgtagggccagtgccctgtgctggcctcagcaatggtgctttggcccaaagttgcagacccctctgttaggccagagcctggcagttaagcaaccctcactcctctgctgtcgcttaagtgtgcccttaaggagaggtgttaccatcccccattctttttttttgagatggagcctcgctctgttgccaggctggagggcagtggcactatttcagctcactgcaaactccgcttcccaggttcaagggattctcctgcctcagcctcccgagtagctgggactacaggcgcccaccagcatgcccagctaatttttgtattcttagtagagacgaggtttcaccgtgttggctaggatggtctcaatctcctgcccttgtgatccacctgcctcggcctcccaaagtgctgggattacaggcgtgagccaccgtgcccagcccctaccacccccaattctaaccctaacatgggggggaggtccccaaagggacctcaccaccagaatgtctacttgtggtcccttacactctaggtcctcaccccgactctcgccaaactggagaggtcctcttcataggtgccactctgggcagccaaaccagcaccagggtccctcccaagcctccctcccagccaccccaggccccagagggacaggcaccaggcagaagttcatcatctttagacttaaggaattaacaagggtcagggagactacaccaggctgagggcttcttggttcctggagacatgcccagctacagcaaacacagggaaacacgaagggggcagctggaagatttggtcttgaacttggggggtgggtaagtgatgatccccacgactggagcagcaggaagaagttgtgtctgaggaagtgctgggccgcccagagggacagccctgccctggagcttgtcgccgggagggaagggaaacaagccccctccctcagtgctgaggaaaaggcacttggctgggtctcctcctgccctctccccatccgtgggagagacggggtccttgcctccttgcccctttcagccgcccagaagccggtcctggttcagcctctggaagaagcttttgccgaactcataggtgctgatcatgatggcacaggagggggcagccttgatgatccgaggaaggaagcctgcagtggaaaggaggcccgtgtcaggggtcaggtcgcaggtccgccatgcccccacccccgacacccacacactgacctgcaaagagtcccttggtgcccgactcggcccggatcctccgcagcagcagccaggtggagtccacatgcagggggttcactgcaaacgcgaggccggctcagtgagaccccattcaggaccccacctgtcccctgccacggcaatctgggccctcacctctcacagcctccatcgctcccagagcgacctggcgttgggtctttaccacgtcaaagggtagagtcagcactgcagccacctggtggggtgggcggggagagggctcagctccacttcctggacccccacccctacctcccagatggctcttgcggctgggagggacaaaggcctcatggggtctgcttctgggcatctccaaaaatcctcaggccccccgcagggagacctccgctggcctcacctccagcccagtccactcaccgtccctgagatgccaccagccacaaagctcatgcccacagaagtctggtccttcggcctgaacccattgagccagctcttcaccagctcatagttgaaccagtacagggcttggggtgggggatgcactgattagagacgggaagggcaaggaagtggccccagaccgtccacctttcactgccaccactccctcccagctgtgagtcttgtctgctacatgcaggctcagaagcaggcactctgtaggaattaatctcctgaccgcctgggcaaatactctacctgctaggcccacttcacagatgagaaacccatggctcagaaaagctaagtaacttcatggtcactagtcacaaagctgggacttggctgtagaccctttgtgcatcaccccagggttccctcacccaccccctgcagcttgggtgcctacctgagaagggcacatctcgaagggcagtggggccccagcccagccacagtgagcgccagccaccctgagccactgcagttcgaacacaggcacccagctcccggtacgacacatgctgagcctgcagctttgtccgcataagctccagggggctgatcacagtcacggtgcccactgtgtggggattgggggtgacaatggggagaagtgagatcacaggtcttacatggcatcacctacctgctgtcccaggtctggggacctagaacacccccctatccctaggctggcagaggttggggctgggagctgggactgactgggtttgggccgaggtggggacagagggaggtcaaaggcccaagactatgctcacggcgggccagcgcgccagccaccatgggtgcgtagaggtcagaggtcagggctcgaccacacaggaaggccttcagttggtcataggcagtgaagtagatggcggtagctggcacagtcatcaccctggggatacagagagaggttagctgggactcccaaaaggacccaaacttttaaagcatcacctgccccacctagccattcaacagggagcaaagggtcaggaagtaccagaggagagtggtgcaggacccggctactcacagggtggcggggaggccgctccagagggtcctggtgccctcgtgcctcacgatcttcacgaaggcatcctggccaagcaggcaccagcccaggggaagaggagggacacaagtgatgtctgtgatggggctggcccaggctaggcctttgcctgacgccctcagcctctgcccacagccctcaggcctccctgcctctacacatgcagtaccccagcagctgggtccaggcggacacctggtcacccttcaaaaaccttatggaggccaggcacggtggctcacatatgtaatcccagccagcactttgggaggccaaggcggataaatcacttgaggcaggagttcgagaccagcctggccaacacggcaaaaccctgtctctactaaaaatacaaaaattagcggcaggtggtggtgcacgcttgtaatcccagctacttcggaggctgagacaggagaaccacttgaacccaggagacagaggttgcagtgagctgagatcacaccaccgcactccagcctgggtgacagagcgagactctgtctaaaagaaaacaaacaccccatggaggtactgccttctccggaagcacttcctgacggaaccggctacctctgcgtgccttgcccaatccctttactcctgggtctgctgcccagccagaccgaactcctcacggacaccgacgaatccctacggacccagctgctcctcaccatggtgccagtgaagcgggtagggtcttgaaaccaggtggcacagcgggcaccatttgggcacaggtacagaggctccaggacaccattgcaatacaggaggcacttccctgtggattggagagaggagggcactggggaaaggcagggggcattataatgacaggatcctagaaccttgcagggaggcagtgggcccctatccctggaaggccagtaaaggccaggtccctgtgtggatgttctggtgcaggtcacaggactggctggcaggacctgggagtatatgctagtccatggctgtggagcccactggtgccctggggacagggacaaggactgtctcccccttgcaccctcccatgctccctgtggcttggggcactcacatttggtataggagaggctccacagtctggaggaaggcatcagctctaaaatacaaggcagcccctcaagtcaggagagcccccacccgccctagggaccccatctctgggagatctttttattttattttttgagatggagtcttgctctgtcgcccaccctggagcatagtggcacaatctcagctcactgcaacctccaccttcccggttcaagcgattctcctgcctcagcctcccaggtagctgggactacaggcgcatgccaccaagcccggctaatttttgtagttttagtagtgagagagtttcaccacgttggccaggctggccttgaactcctgatctcaggtgatccacccacctcagcctcccaaagcgctgggattacaggtatgagaaaccacggccagcctctgggagatctttcttttgcccaggcaccacccctcactagttccaggtcaggtactcaccgctggccatggagggccgctgagactgcaggcgaaccttcaccacgtccaggggtgtcactgggggaggaagcgggtctgaaggctcctttcaggaccccacccctaggactcctcccccaggaccacacagcctccaatctccggtctgccccatccccacccgcccccaccccacctcccctaggtcttactgaagagagaggtaaccacagccccggtgcctgaggccaccatttgctggagggggctgatgcccgcagggtcctggtcagccatcttgaagcttcagtcctgaaaaccaaacctcaaacagaccacaactccagggatggcaggaaaggaggctgggccactgtgagacttttgttttgagacggcgtctcgctctgcgcactgttgccaggctggagtgcagtggcaccatcttggctcactgcaacatccacccccgttcaagcggttctcttgcttcagcctcccaagtagctgggactacaggcgcgcaccaccacgcctagttaatttttgcatttttagtagagacagggtttcaccatgttggccaagatgatctcgatctcctgacctcgtgatccgcccgcctcagcctcccaaagcactgggattacaggcgtgagccaccgcacccggcccactgtgagactttaacccaaccctcatccaccgccctcgaaacatctgttgcctcaacaaccctggcaatgacctctaaagcagggactgtccgcccccctccgccggggaaaactaaggctcggggagacgaggtggcctgcccaaggtcactcaggagtggttccgaaggaagctagggtgccagacctatcgctcgaatgcagtaggagccagggtccttccctcgtccacctcgcacgtgtccactgcgcacctcctacgtgcaggcgcggatttggccctcgtggccccaaaatcagagtacctgtgctgcccccacagcccccactccagcaccaaggccccgggcaggcacctgagagcccaagttactgggcgtggagggacggccgggcatcgagggtgacgtgtaaacagatccggtgaccaagaagggcccgtcgcctcctcaggactgcgggctgggatgcccggccctccccgcccggccggacgggccagacccggggcccggagagaaagagcagtctctgggttcccgccccaaaatgcaggcccggggcgcagccgggagagcgggaagtaggaacgtaggaccaggacgtctccccgaccctcggcgacactcccggccccgaacggcggagagccgccaggtgagggggaccacgccagctcgacggccccagcacctgccctggctcgcacggccgcccggagacccccgcttccgtctccgcccccagccccggcccagtgccgcctacctggctctaggctggtgctcgtgcggcgcggcgcccagggtcaggcgggcccataccggctccgccgcctgtgcgcggtccgcgcgcgctcgcagcgcacctaggccgacgccgaaagcagccaagggggccccgcccctacaccgcgccacgaggccccgcccgccgcgggccgaccagccgcaagcccggagtgtccccggctccgcccactcgcgtctccgcccggacctgcgacggtcccgcccccttgacggggccgcgcgggcgagttccatgcctgtccagcgctgagagctgccggccaacttcgcggtctccacgtcgcgcttaacgtggcagcagcacgcacttccagcatctttttttagacagcatctttttcagcctcgctctgtcgccgaggctggagggcagtggcgcgatctaggctcactgcagccttgacctcccgggttcaagcgatcctcctgcctcagcctccggagtagctgggaccacaggcgcgcgccgccacgcccggctggtttgttacttttatttttgtctccctattttgcccaggctagtctggaactcctgggctcaagcgatccgcccacctcggtcttcgaaagtgctgggattccaggcgtgagccgccgcgccggccttaacagcgcattttcaccagccccgccccggccgcgcgcggcactggaaaccccagcgccttctggacggcgagggtgacgcactggccctcttcctcggtgtcctcaggtgcgtggcggcggcagtgagaatgagttcttcgagatcgccgggagaccacacaataacgacgaagttacttgccgggctacccgccgagacttgaaaacttcgcggcgacttctctcgccggccttagcatcgcccccatttttcaggttacaggacaggcctgcaactgcaaaacgctttgtaaaccacagggccccgcgcgggtgtgcgccactgggttagctgagctgcagcccgggccgggcgggctgggacgtgagcaagccgggggagacgggagagccatggggagccagatcccaccttcgcgtgaccttgggcaaatcacaacctcgcctaaggcccggaatgactctgcgcggagaggaagagcactgagtgcgggagggcatcgacgttttggtgttggttgctctcgtatcgtgatttcttctgagtctcaaaactctttgcagtaggttattgttgaaatagattaccacaggccgggcgcggtggctcacgcctgtaatccagcactttaggaggccgaggcgggcggatcacttgaagtcaggagttcgagaccagcctggccaacatggtgaaaccccgtctctactaaaaatacaaaagtagccgggcatgatggctggcgcctgtaatcccagctactcgggaggctgaggcaggagaatcgcttgaacccggccggcggaggttgcagtgagccgagatcgcaccactgcattccagcctgggcaacagagtaacactccgtctcaaaaaaaaaggccgggcgcagtggcttacgcctgtaatcccagcctttttggaggccgaggcgggcggatcaccagaggtcaggagttcgagagcagcctgaccaacatggtgaaacctcgtctctactaaaaatacaaaaaattagccgggcgtggtggcgcatgccagtaatcccagccactcgagaggctgaggcaggagaatcgcttaaacccggaaggcggaggttgcggtgagccgagactgcgccattgcactccagcctgggcaacaagagcgaaactccgtctgaaaaagaaatagattaccccgttttacagaaagtgaaactgaggctcgacgtgaagagccggagattcgaaccggccgggtgcttttcccagggctccacactgcctccccgggagacaggaaggcttaagtccagcgctgccctctccgatcccgcttgtcagggagacactttatttcccggggcagccccgtaccccaggccccaccacccacttcgcgtttagaacttctgtgctatcttgcttatttgtcctaacagagaaaccagcacgcgcgggcggtggcggaggggggcgggcgggcgggtggaggcgggggggggcgggcggggagatgggtactcctagcctgcgcctttaagaagggtaggcctcgactttgacgtctctgccttccccgcccttcaggcccccactggtcgcgtccggcgctggaggagcccagtcagccggcgcctgccgggttagcacgtggactccgaggggccaactatcagctttccctgacaaaatgcctttgagctcccccacagctctgaaactccagcttgggagcagggagagtgcaatctgtgacctgtaaaggggcgctgggcaaaagggcccgagagaaggcgtcctttccattcccttcccatctcaagctgagttcagaaatgacacgaaataatttaatcaactatcagtcaaggtcgggctcacgcctgtaatcccagcagtttgggaggccgaggtgggcggatcacctgaggacaggagttcgagaccagcctgaccaacatgacgaagccccgtctctactaaaaatacaaaaattagccagcggtggtggtgcgcacctgtagtctcagctacttgggaggctgaggccagagaatcgcttgagcccgcgaggtcgaggctgcagtgagccgagatcacaccactgcactccaacctggatgacagagggagactctgtctcaaaaaataataaataaataaataaataaataaactatcggtcaaggtgaaagcctactctccgccaaggttctttacaacttagacgttttggtttacggaacaggggaggaaactgagggctcttgtgtgtagtgactttactcgtgtggaggagaacccagactttccctgcacacactctcccgttttatggatgagaaaaggggggccccaaaggtcaaatcgccccaaggtcactcaaatgaaagagtcagcattagaccccccaacgtgcctgagccagatgggctcccaccctgtccagttctcaacccaggtgctgtgttccagcagcaccctgacctggctttccatctcacctgcctcttacaagcaagtgtcttaaggcctctaagccttagtttccccatttacaaaatgggctgatggtgatgataacgcaccttcctctagggattatgtaaggatttaatgcattaatggctgtgacgtgcttagaaccctggcaagtggcaagcattctatgacaactactactattgctgttactgtattgttgttaattgctctctagaacctgtggcatggaaagttccccagattctggccccacctctgcctccagtatgcagtgatggataataataacttcttatacccagaacgaaggtcaccagtgcaaagtagcacagccaggaatcaaacctggggacctctgagcctgtttccccaacagtacattgagggccttgcactccatttctggttttctttttgtgatgctcttaaataggatccttagagatttgtggatacacctgtttcctcatctgaaaataaggacgatatcacctgctctgcctaacgtacagattcttaatatcatgtctctgaaagctacatgaagagtcaataaacagttctgtgagacctgccaggggcccagagccgcgtggatcacagtccttaccttctccagaatgtaaatgctttgaagcttagagaaccatgaggcctcatgggtgtgaccaaagcagtggccgctggagaggttatccatgggtgatgggacacctcgggacctcgtgaagtctctcccaagaatgaccgtggcagttcagggtggaggaggagctttgacatgctccagaagctatggagccctgactcaacacgcccaccctcgaggagcaagcctggaaggctgcagaggtggccactggcctggctgactcaggcaaggtttacattggttatgcacccagtggtccttccagaggcaacatgtggccccatgtggccatctgcagcttcctcgcacagatggaaaagcagaaactctccctttttaactgtaaaaggggagaagaaagtaccagctgcaggggtggttgtggagactgaaggaccagtcctcacctgatacccaaggggccagtttattacaaggctgaatttgtccaaggcaagccctgggacaggggcagtgtcccctccagcttgaacccccagggcctaggaagacatctctggggctgatggaggactcaagggcttcacccatggatgggaccccaccagcacctctgagtccagggccagcactgtctgcatctagagtagtctcccaaagcagggcccagggctgcagaaccactgaggccccctactgcccagaggaaaagtccaaatcccaggcccatagcaaatgtagtctgatcttttttttttttttttttttttttttgagacggagtctcgctctgtcgcccaggctggactgcagactgcagtggcgcaatctcggctcactgcaagctccgcttcccgggttcacgccattctcctgcctcagcctcccgagtagctgggactacaggcgcccgccaccgcgcccggctaattttttgtatttttagtagagacggggtttcaccttgttagccaggatggtctcgatctcctgacctcatgatccacctgcctcggcctcccaaagtgctggaattacaggcgtgagccaccgcgcccggcctgtagtctgatctttaatggattctgagggtggaaaggagtaggggagtgatggaggactttattggaacaagtggagaaaagggaataaggtctgtatgctaattactcttttttttttttgagacgaagtcttgctctgtaccacaatgcccggctaatttttttttgtttatttatttatttatttatttatttatttatttatttatttatttttggagagaccgggttttccatgttggccaggctggtctcaaactcctgacctcaggtgatccacccaccttggcctcccaaagtgctgggatttcaggcatgagccaccatgcctggcctcccaggttcaagcaattctcctgtctcagcctcccgagtagctgggattacaggtatgcaccaccatgcctggccaatttttgtattctcagtagagacagggttttgcaatgtaggccgggctggtcttgaactactgacttcaggtgatccacccacctcggcctcccaaagtgctggaattataggcgtgagccacagcacctggccaatattactttatcagtgttaaaatttctggagtgataacaatactgtgattttgtaggagaatgccctgttcttaggaaacacatactgtagtgtttagggatgaataaagtgttgtgatgtctgtaacttagtcctaaatggctcagcaaaaaaagaagccaggcatggtagctcatgcctgtaatggaggctgaggcagcaggaggatcgcttgagcccaggagtttgagaccagcctgggcaacatagggagaccctgtctcttataaaaaacaaaaaaaaaattaactgggtgtggtgttgtgcacctgtagtctcagctacttgggaggctgaggtgggaggattgcttgagcccatgaggtggaggctacagtgagcagtgattgtgccactgcactccagcctgggtgacagagcaagatcttatctcaaaaaaaaaaaaaaaaaaaaagccagtgtagcaaaatgttagccccatctctactaaaaatacaaaaattagccagccgtggttgcgggtgcctataatcccagctactcaggaggctgaggcgggagaatcgcttgaacccaggaggtggaggtcacagtgagctgagatcacaccactgcactccagcctgggtgacagagcgagactccgtctcaaagaaaaaaaaaaaagaagatatatatatatatatatatgcatacgtgtgtgtatgtgtgtgagtgtatatatatgtatatttgtgtgtgtgtgtgtgtgtatatatatatatatatatatatatatatatatatatatatatatataaaacagctgggatcagcccaatttggggaagtcctccctgtctccccctgcctctgtggcctgagaaggtgggctggaagtgtctaggcacccaaggctttattggggggccctgggtgtggtctgaggaggtgggcccctagagggagagggtcctggctaagactttccagcatgtcccccagcctgggtcccagagctctgctgggacagcgtggattaatatggaaggtagttttagccatagctatgaaaattctaaacgccaaacccttgatccagccaggccacttctaagcgtttctctagtcatctgctcatacaagtgtgaaatgatggtaccagcttggccttcttcattgcagccttctttgtaacagcagaacatcccgtgaaagggaactgttaagtacgtgaccctatctccatgtgacaaatccacacagccttgaaagggcggcattccctgacctatccaggtggggtggggggtgagggctgcagatctctatatcattatgtaaaacaatctcaaagacagagttaaattaaacagcaggtgctgagagcgtgctggacactcgttccaaacagcagcgttactgccccctagaggacattttttgaaatttatgcggccactgtcatttctggttgtcacaagactggggcttctggcatttgatagatggcaggtcagggaagctaaatgccctgtaaggtgtaggacagtctgacacaatagggaatttccaacaacaagaacacatctctcaatttccttctgtctttctgggcaattacatacatgaggaaatgtttgcaattctcagacctggaaaatggttctgttttacccatatacccacacctttttttttttttttagacagggtctctcactctgtcgctggttggagtgcagtagcacgatcacagctcactacagcctcgacctccccggctcaagcgatcctcccacctcagcctcccgagtagcacactcctctgcctgactaattcgtttgtatttgttgtagagacagggtttcgctatgctgcccaggttgtaaccatacttcttttgaatacttatattctgctatgcattgagttttccaggaataaaaccactctgcagttgtatggaaaattgggttttgtcttcaagaactttaccgaaggtcatttgccatttcattttttgtttggtttgttttgtttttttgagatggagttttgctcttgtcgcccaggctggagtgcagtggtacgatcttggctcactgtaacctctgcctcctgggttcaagcaattctcctgcctcagcctcccaagtacacgcccagctaattttgtatttttagtagagacagggtttcctcatgttggtcaggctggtctcaaactcccgacctcaggtaatctgtctgcctcggcctcccaaagtgctgggattacaggtgtgagccaccgtgcctggcctttttttttttttttttttttaagacgggacctcactgttgctcaggctggagtgcagtggtgtgatcatagctcactgcagcattgaatccctgagctcaagtgatcctagtgcttcaccttctcaagtagctgggactacaggagcgtgccacctcgcctggctaatacatatatatatatatttttttgagtcagggtctctcactctgttgcccaggctggagtgccgtggcacaatcacagctcgctgcagcctcgacgtcctggattaaagcgatcctcccacctcagctctctcccccctccccccaccagtagctgggaccacagtcacgcaccaccacgcccagctaatttttgtttattttttatagagaaggggtgtcagtatgttgcccacgatggtctcaaactcctgggctcatgtgatcctcctgcatccacctcccaaagtgtcaggattacaccacagggcccagccttagtcatttcactgtaagatgggaataataattgtactacctcaaaggattgtgttacagattaaagagcataatacagaacctggcacaatataaatctcaataaacagtaacaggacctaccttttaaaaacactgaaatgaagtatgccagctatcatcctagcagaagagattgaattaaagtccccttatatgtatttgagtacagatttctctgctaattcagagaattaggggaccttgtctccatcctgggtctcagtttcttcatctttaaaatggaaaactgggtgtggtggctcacgcctataatcccagcactttgggagcccaacgtgggcagatcacctgaggccaggagttcgagaccagcctgatcaacatggtgaaaccccatctctactaaaaatgcaaaaattagctgggcgtggtggtgcacacctgtaatcccagctacttgggaggctgaggcacaagaatcgcttgaacctgagaggcagagggtgcagtgagctgaaatcacaccactgcactccaacctgggcaacagagcgattctctgtctcaaaaataaataaataaccaaattaaaataaaaaataaaataaaattgaaaggatagtactcctggccccacttccttcctagggctgccaaggtctaagctgagagatgaggggtgtggcaacagtgcatgacagggaaagctggcctggggcgggccgctccttctcccttcctgtcctccgtgcagctgacttctccctgcccttctctgggttctggagatgactctgacccaacctctctgagctctctgagtggggcagcttcctcacctaggccctggcctattgcttcagagacaggtccccaccgggttaacaagaggaacccctttgatgtcctaaaaagaattcctcctgtttttaatgtgccagtttacaagatctcttcacatccatcatcccgtttgaacctcacatgactgtgtggagggcaagcgggggttattgtgtacacattttacagatgaggaaaccgagtcttggaggagttgagtaatccattcaagtcagttggagcagacatctcctgactcacagggggcccacctggagaaaggccaggggcactcaggtgggctggcagggctgggagggctgggagggaggatcagggccgtgagctgagctggcatcggcatccagtggagctggtgaggtgggcaaaactctgggctctgattgatttgcactcagacaccaacaccactgcatcctagctaatgactggataagactttagcatctcatatgcctgtgaatggagatcattctctggagtgttacaggaactctgcatttgaaacacaggcctgattcttgccatctctactcctgctcccagctctcacagccagagtcaacagtgcccgcctgtccttccactgccaccacccaaactgtctacctgctgcccttaacaacagataggatccaactcctagagtccccaagcaattcagggaccactcagaggtgaaacaaccccaaccattctcaaccttagcaaaaggaacagggtggtgaagggtactccccatgcccatagggacacaggacactggccagaccaccaagtggcgcctggccccccatgggccttcctgacccggtagccacccctcccaggggaaggacacagtgttctcagatgtgggcccaggggctgtgtcatggaggagctgggaagggtttagaggacctgggtttctgtctttggtttttttttttctttccactctagtaaaatcaaattttatatcattgattttgtaaagtttaattggaaaatgaatttctttgtgttgaataagtgcaatttgctggtcaaaattcattcaaacataggagtgagagaggaggaagtgactgtttattgaggaactgtgatgtgccaggcactccacaagatgttttgctcattcaggcctcctgagcaccctgggagacaggcattccaatgagcccatttcacagatgaaggcatttagggtcaaaacaataagccaaagtcacccagctggcaggaggccacgctggaatccaagctcagcagacagtgaagaggcccgtttgctctgctcccagcctgtctgctaggcttgcagaaaagcactgactcttgtcctctggcacctgccacctgcctgtctggggtgggaaaggcgagaggacaagggtgctgctttttgttataatttgattaaaatgcatttgtggccgggcgcggtggctcatgcctgtgatcccagcactttgggaggctgaggcaggcggatcgcttgagctcaagagtttgagacctgcctgggcaacatagtgaaaccctgtctctaccaaaaatacaaaaaagtagccaggcgtgttggtgtgtacctgtggtcccagctacttaggaagctgaggcagggggatcgcttgaacctggaaggtggaggttgcagtgagctgagatcgcgccactgcactccagcctgggtgagcgagaccgtgtctcaaaaaaaaaaaaaaaaagtatttgcatatgacactttgttaaaacagtgccatggctcacgcttgtaatcccagcattttaggaggatcacttgagcccaggagttcgagaccagcttgggcaatacaaccagaccccatctctaccaaaaaataaaataaaattagtcggacacggtggtgtgcacctgtagtcccagctactctggggacttaagtgggaggatcaattgagctcaggagttcaaggctgcagtgagccatgatcataccactgtactccagcttaggtgacagagtaagaccctgtgtctaaaaagcaaacaaacaaaaaacaaacagttattgagtgaaaaacaaaacagagaagtggcttatccactgtcactgggcaagttcacggcttatgctgggatgggaacatgggtctcctgactgtggtcagtacttctgttcccaaataccctgccacagcctctagcctgggcactgggctgttcctgcttctcctccctcattacccccccatagcccagtaaccccccacccctagctctggtttccctttctgcctaaagggagacgctctgtcctgatatggagcattccccccaggacccccagccctaccactcatgagttggaatagttccgaaaggacatagcctgtctgctcctgctatctctgcctgccgtgtggggagctggtccagaatgatggagcccctggggagcaaggggtcgtgtccagcttgggagggcttctggagacctggcccgagtcccagatccttcttgaactagaaaaatgcctgctgtttttagtgcattctcagttgacaaagcattttcttacctctaatcccattggatctttataatgaagaaggaattccctgtcaatctgcattgtattttatttaattaatttatttattggttttgagacagagtctcgctctgttgcccaggctggagtgcggtggcatgatctcgcctcactgcaacctccgcctcctggttcaagcaattctagtgcctcagcctctcaagtagctgggattataggggtgtgccaccacacctggctaatttttttaaaaaatttacttatttattttgagacggaatcttgctctgtcgcccagactagagtgcagtggcgtgatctcagctcactgtaacctccatctcctgggttcaactgattctctcacctcagcttcccgagtagctgggattacaggcgcccgccaccatgcccggctaatttttgtatttttagtagagatgaggtttcaccatgttagccaggctgctatcgaactcctgacctcaaatgatctggctgcctcagcccccctgcattgcattttaaatctgagagacagaggctgagagtggcctgtgtctagcaccaggacaggctacacagtttggaggtccagtgcaaatgaaaatgtgggtctccttgttcaaaagtattaggactctggccaggtgcgatggctcacgcctgtaatctcagcactttgggaggctgaggcggatggatcacctgagatcaggagtttgagaccagcctggccaatgtggtgaaagcccgtctctactaaaaatacaaaaattagctgggcatggtggcagatgcctgtaatctcagctactcaggaggctgaggcaggagaagcacttgaacccaggaggcggaggttgcagtgaaccgagatcacgccattgcactccagcctgggtgacatataaggtccagccctacggggcttagcaggtgttctccccgtgtgcggagatgagagatcataagaaataaagacacaagacaaagagataaagagaaaacagctggaccctggggaccactaccaccaagacgcggagaccggtagtggccccgaatggctgggggcactgacatctattgcatacaagacaaggggggcagggtaaggagggtgagtcgtccaagcgattgataaggtcaagcaagtcaagtgatcatgggatagggggcccttcccttttaggtagccaaagcagagagggaaggcagcatatgtcagcgttttcttctatgcatgtatcaaaaagatcaaagactttaaggctttcactatttcttctaccactatctactacgaacttcaaagaggaatccaggagtatgggaggaacatgaaagtggacaaggagcgtgaccactgaagcacagcaccacagaaaggggtttaggccttgggatgactgcgggcaggcctggataatatccagcctcccacaagaagctggcggagcagagtgtttcctgactcctcgaaggaaaggagactccctttcttggtctgctaagtagcgggtgccttcccaggcactggcgttaccgcttgaccaaggagccctcaagcggcccttatgagggcgtgacagagggctcacctcttgccttcttggtcacttctcataatgtcccttcagcacctgaccctataccctccggttattccttggttatattagtaatacaacaaagagtcatattaaaggctaataattaataatgtctatactaatgattgataatgcccatgaccatctctatatctaatttgtattataactattctcattctaactattttctttattatactgaaacagtctgtgccttcaatctcttgcctcggcacctgggtaatcctccgcccacagtgacaagagtgaaactctgtcttaaaaaaaaaaattaagaatttcaagataggacagcagagctttaaattttttttttttcctagaggcagagtcttgctctcttgcccaggctggggtgcattgttgcaatcacatatcactgcagccttgagctcccgggctcaagtggtcatcctgctttggcctcccaaagtcctgggattacaggcgtgagccactgcacccggcctgtagagctttaaacaaagcacaggctgcttctgagcacagggccctcgtcacatggctatgaagccagccctgcctggacccagaaccctggtgtgggcactttatagcttataagccctccagtcaagaggcctcagcctgagcctccctgagcctcagtttcctctcctgtaatctgtgaaagcactgagcactaatctcccttccgggctagctttctgcaatagcttaaagctcccatcccaagatctctccaagaatcctcttaccaagtccctgctcccagcctggctccctggtccccatccctctcccctctcacaccctttcaaagcccagaaaggacaggtgaccgagtgactgtctctgggctcatacagtggggtggtctcctgtgacaggctagggcttcagggtatggcttagcctatccctcacacttccttggggcctcttggggcagacagcccaggcggggcccagcaggcacactagtcaggtgcctgatgatgagggcaggcgcctggaactgggtcaacaatcgctcacacggaggtgactcaagcagcaaggggaaaaagaggtgggggtggggaggtggctgtttctgtgccctcacttgagcctcagcttttagggttgccagatttatttttatttttatttttgagagtctcactctgtctcccaggctggagtgcagtggcgcaatcttggctcactgcaacctctgcctcccaggttcaagcaattctcgtgcctcagcctcccaagtagctgggattacagatgtgcaccaccacccctggctaatttttgtatttttagtagagatggggtttcaccatgttggccagtctggttttgaactcctaacctcaggtgatccacccacctcagcctcccaaagtgctgggattataggcgtgagccaccattcctggcagcctgaaaattttttaatttttttttaatttttttttttttttagtgatggggtctccatatgttgcccaggctggtctcaaactcctaggctcaagtgatcctttcaccttggccttggcctcctaaagtgctgggattacaggcgtgacccactgtgcctgcctgctggtatgtaacttgttgttttttttttttttttagacaaagtctcacttgccctggctcaagtgcagtggtgccatcttggctcactgcagtctccgcctcccaggttcaagtgattctcctccctcagcctcctgagtagctgggattacaggcatgtgccaccatgcccagctaatttttgtatttttagtagagacagggtttcaccatgctggccaggctggtcttgaactcctaaccttgagtgatctacccacctctgcctcccaaagtgctggattacaggccaataggcctggccccctgtaacttttttttttttttttaatttttgagacagagtcttgctctgtcgcccaggctggagtgcagtggtgccatctcggctcactgcaagctccgcctccctggttcacgccattctcctgcctcagcctcccgagtagctgggactacaggcgcctaccaccacgcctggctaattttttggatttttagtagagatggagtttcaccgtgttagccaggatggtctccatttcctgaccttgtgatccacccgcctcagcctcccaaagtgctgggattacaggcgtgagccaccacgcccggcccctgtaacttcttaagcgaaggaaaataaaaaaaaaaaaaaagcagaagccacaaaggaaaagattgaccaatatatttcagatgacataacaacaacacaaaagacaaatgacagattgggaggaagcatctgaaacatacaaaatacccagaatatataaacagctcctacagttcaacaagaaagaaaatactgcaaaaacaatcagcaaataatactgtgatggtagaacaatgtatctacttggatggtgctcctggattagattaacatttaaatcagtgaactttggttaaagcaaattgctctccattgtagggagaccccctgaaactattgctacggaataaaagatgaaatgctcctgattattgtaaatacgaaattgcatgcaggattgtgtaaagacaatgccaggttggactgccagtataagccaacagctcgtgatgtgcttccccctgaagagagcctatgaacagacgtgcagtcagggaggtttcacatcaccaatattcctatcccagaaaagcagatgttcatagccctgggaatggaatgtgacccttgtggagggcctataaatggacgcatgagcggcacctgttcatatggataagatagggctataaatgccctcatcttgccatggctcttctaggcctctttaaggttaaggcatactcccttctgataatttctggtctaactggttatctagcttcacgtcctgtttctatggattgtttgtaaccagcttttgctgcaactcttactgctgattaatatcttgctaatcataggttatggaaagactgtgtttctgttttaaggctctgttagaaattactgatgcacacactatattgtaaattcttatctctgtatactgtacttctgcatacagatgttatgttaaagaattacttcatccccatgtgaccatctcacctcataatcaaacgaccctaaatccctcactaacctaccctcgccctcactaaacttaataataaatgctggtatatccagtgcattggcagcatcgcaggaccagaaggcggtgacccccttggacccagctttcactatcttgtgtgtgtctattatttcccgacctgccgatccacctggggacaaagagagagccccattgccttgtgggctgctggccagatcccgcgatactccataatgtggatggacctgaataaaacagaaagacgggcctcgccgaactagagggaattctcctgcaggctaccctcagacttaaccatcagctctcctgggtcgccagcccaccagctcacactaaaggcttaggatggttatgataagaaagacagatgataacagaagttaaccatggatgaggctaaagagaaattgaaaccctcatacatcgctggtgggaatgtaaaatagtgcagctgctttggaaaacaggctggtagttacacaaaaggctaaacagaattattatgtaatccactaattctactcctaggtatatacccaagagaaatgaaaacatgtccacacaaaaacttgtatgggccgggcgtggtggctcactcctgtaatcccagccctttgggaggctgaagtgggaggatccctggagttcaggagtttgagactagctgaccaacatggcaagaccctgtctctacaaaaaccacacaaaaattagctggacatggtgataagcacctgtagtcccagctacttgggaggcggaggtgggaggattacttgagcccaggaggcagaggttgcagtgagcagagatgacaccactgcactccaacctgggtaacagagcaataccctgtctcaaaaaaaaaaaaaaaaatgctggggggatgatgaagataggcacagtggctcaagcctgtaatctgtaatctcagcattttgggaggctgaggcagcaggatcacttgaggccaggagcttgagaccagactaggcaacatattaagacaaaaaaatacaaaatatagctgggagtggtggcatgtgtctgtattcccagctactcaggaggctgaggtgggagggtctgaggctgcagtacaaggtggcaccactgtaatccagcttgggcggcagaggaaggctctgtctcaaaaacaaagaaacaaacaaaaatgggccacgcgtggtggctcacgcctgtaatcccagcagtctgggagattgaggtgggtggatcacttgaggtcaggagttcgagaccagcctggtcaacatggcggaaccctgtctctactaaaatacaaaaattagctgggcatcatggcacatgcttgtaatcccagctatccgggaggctgagacaggagaattgcttgaacccaggaggcagaggttgcagtgagccaagatcgtgccactgcactccagcttgagtgttggagtgagactctgtctcaaacaaatgaaaagaaacaaacaaaaaagaaatgagatactgatacctgctatgtgataagctttgaaaacattatgctaagtgaaagaagccagttgcagatcacatattataaaatttcatttatatggaatatccaaatctatagaggtagaaagtagatcagtggttgcctagggttagggagggtgactgctaaaggacataaggctgccttctgtggtgataaaaatggtcttaaactgattgtaatgatgctgcataactctcttaagacactaaaaaccattgagttgtacactttaatttttttgtgttggcgggggtggatggagtctcgctctgttgtccaggctggaatgcagtggcacgatctcggtttactgcaacctctgcatcccgggttcaagcgattctcctgcctcggcctcctgagtagggaattacagacctcgttatcgtggcaccttacccttctgatgttaaaaaaaaaaaaaaaaagagcgagagagagagagagaaacatttgtgaagtaggttgttgagtctcagcactattgaccttttgggcaggatacttctttgttgtgggggattgttctgtgtgtcgtgtgatgtttagtgggattgctggcccttacctaccagatgccagtgtccctccaccctgagttgtgacaacccagattgtctccagacactcctaaatgtccctggccggcaaaattgccgctgctcaagaatcacggctttgacgattagactttgtgatatttgtttcagtctgtttaggttttttttcttctacctgtatttttttctggttctgggtggttgtaattagtaggttattgatcgattcacctaacatttcatgaaagtttcatgtgtgtgtgtgtttcaatagaagcataaactatactccctagtctcaagatacacaggaaggaaaataagcacaaatgtgtcaccagggcacagactagtactaggtcctcagcaggccaggtgtcttatccgctgtctgggtctgctctagctccaggcttagaacccctgccacacgactccacagctcggttggcaccctttccctcctccgacttctgctgcctcgagcttggttagccatccccctgcccctgcctcatcctcagctccagttccttgctcaggctgcagcagtctccatcccctgtgcagacactgccgttcctccacggcccagtatcaggctttccctgggcctctcctctctcctggcccatctcccatcatccatctctgcctggcccaggccctttggcaccaagcaggctgactcttgtcactggctaatctgttctgtggtacattttctctcctcaccctcccatatcaattcctcgaaggcagggccgatctggagactaggaagccacttctctttcgacagcccccaccacagcccagcccgtgccaggcacccagcagctcctgaagcccactggcattgaacatggcattcaatccctgccaagcctgcccttcccatctggtttcccagggctcttcccaacacctcctcctccacctgccagttaaaatcttcccagactcagctcaaggagatgctcctaaggtggaatgaaatctcttcttccccacctggagacaatctacttcctctccctacacctggcaactggcgcacaaccttgtatcttaaattagattcagcctgagactgtctcccaccaatccctgctccctgtcctgctgagcaccttgaggaaagggctttggggctgtttatctttgtcctggaaaccatccttcaactcactctggggcctgcctagcatgtcaaccgagtttggagaatagggcagaatagggcaggacaggacaggacaagacagggcaggataggataggagcgagccagctcagtagctcacatttgtaatcccagcgccttggggggctgcggtaggagaatcgctttgggagcaggagttgcaggccgcagtgagctatgatcagcttgggcgactgagcgagaccctgtctctaaaacaaacacacaagtccgggcgcggtggctcatgcctgtaatcttagcactttgggaggccgaggtgggcggatcacgaggtcaagaaatcgagaccatcctggccaacatggtgaaaccccgtctctactaaaaatacaaaaattagctgggcgtggtggtgcgcgcctgtagtcccagctactcgggaggctgaggcaggagaatcgcttgaacccgggaggcagaggttgcagtgagccgagatcgtgccactgcactccagcctggcgacagagtgagactccgtctcagaacaaacaaacaaaaggatagaaaggcgagcacaaatattcccaattcataacactccctcgcactgtcaatgccccagacacgcgctatcatctctagcaaactcccccaggcgcctgcaggatgggttaaggaaggcgacgagcaccagctgccctgctgaggctgtcccgacgtcacatgattctccaatcacatgatccctagaaatggggtgtggggcgagaggaagcagggaggagagtgatttgagtagaaaagaaacacagcattccaggctggccccacctctatattgataagtagccaatgggagcgggtagccctgatccctggccaatggaaactgaggtaggcgggtcatcgcgctggggtctgtagtctgagcgctacccggttgctgctgcccaaggaccgcggagtcggacgcaggtaggagagcggccgcgcagacctctcgcctgctcctgcccaggggcccgccagggccatgtgagcttgaggttcccctggagtctcagccggagacaacagaagaaccgcttactgaaactccttgggggttctgatacactagggggagttttatgggaaagaggaagcagtaattgcagtgacgccccgttagaaggggctttctacctccccagcattcccccaaagcagggaccacaccattcttgacccagctccacccctgtcggtaggtgctggcttcttcccctctcctggtggtggtgggtggttcccgcggcggcctggagccggaggggcgcgcgaccctgggctgggagctccgagggcctgggaacgagacctgagaccttggcttctcgaaggtagtagggacttgggagtggtgactgaacctggtctggctcctccttacttcctcttgttgcgggtgggacgagctagcttccgcctctcccagccactttttcctgctcatttgcagctaggttggctccccttttgggaatttcctctccccttggcactcggagttggggggtgccacctagtggaagataacggagctagggtcttgaagaggctgctgtcccctctggctgttttggcggtgtagggtggcatgagagactgcgactcgcctcctcatccctgtttctgtatgcgagtgcttgtattcagtagaagcatacactatactccctcaatttagggtaaacaggaggggccacatgcacaggtaattcaccagggagccgaacactcctgtgcagacagactccccttcccagcaagccatggcagcggacagcctgctgagaacacccaggaagcaggcggtgccagctgcaggtgctttgcctgggagctgtggggctgaggagagggtccactgtccaggaccagtgaacttcatccttatctgtccaggaggtggcctcttggggatgctgagttaggggaggggcacttgaggaaagccaggtggagcagagaggatgtgagtgactgggtgggtgagatttcctgcccctccccccgcagtggtatccacacctagactcgtggggtaactgaggcacagacagagagcaacttctcaggccctcacagttggcaattctaggattaggacccaagtgcgattttcaggcagtccctgtaccctgtttctgttgtacctgttgcaccattcccaggcactgcccatcgtgccactagtgatatgaacccaggtccaatacgctctggggccatcaaagcctgacgtcaccatgacctgatgtgtgacgtgttataggtgtcccttggtatcttcacggaactggttccaggaccccaaaatctgtgggtgctcaagcccctgagataaaatggtgtaatatttgcatataacctatacatactttaaatcatttctagattacttatacctaatacaatggaaatgacatgtcggctgggcgtggtggctcatgcctgtaatcccaccactttgggaggccgtggcaggtggatcacctgaggtctggagtttgagaccagcctgaccaacatggtgaaacccccatctctactaaaaatacaaaaattagccaggtgtggtagcgcacacctataatcccacctacttgggaggctgaggcaggagaattgcttgaacctgggaggcggagttcgcagtaagctgagatcgcgccactgtactacagcctgggtgacagagcaggactccatctcaaaaaaaaaagagaaaaagaaaaagaaatgccatgtaaatagttgtgatcctgaattgtttagggaataataagaaagaactatctgtagatgttcagtatagatgcacccatcgtaagcctaactacattgtataactcagcaacgatgtaacattttcaggggtttttttgttttgttttttgagacagaatctcagtctcactctgtcacccaggctggagtatgttggcgtgatctctgctcactgcaacctccacctcctgggctcaagcgattctcctgcctcagcctcttgagtagctgggattgcaggtgtgcgctaccacgcatggctaatttttgtatttttaatagagatggggttttaccacgttggtcaggctggtcttgaactcctgaccttgggatccgcccacctgggcctcccaaagtgctgggattacaggcgttagccaccgcgcccaatatattttgatccctggttggatatggagggctgactgtacttaacatctctaagcttcagtttcctcctttaaaataaaggtgtggctgggtgtggtggttcaagcctgtaatcccagcacttagggaggctgaggtgggtggatcagctgaggtcaggagttcaagaccagcctgaccaatatggtgaaaccccctctctgctaaaaatacaaaaattagccaggcgtggtggcgagcgcctgtagtcccagctacttgcttgaacttgggaggcagaggttgcagtgagctgagatcgtgccactgaactcgagcatgggcaacagagcaagactgtctcaaaaaaaaaaaaaaaaagggggtgagcagacgtggtggcacgctcccacagtcccagctacttagtaggaggccaaggttggaggattgcttgatcccaggagtctgagtccagcctgggcaacatggcaatacctcatctctaaaaataaaataaaagtaaaggtattaattactactttggatggttgttgcaaagaaatatatataaaataatggagagtcttgtaactggctcccaagaggctcaacagacattactgtttttgcttcttcattatgagttacctctctggccaccccactgaactagctgggctagctgagcctgggagaagagttgtttaggaagtgagaggctgctctccacagagactcaaggctcagttcctcctggtgactcagatgggcagcccagtgggcacacgtggtctctctccacatgtggctgagtttcacttccagaatagatggagaggcaagggcagggtttagcatgcttgaggaatctcagagggccctggtggtgtgggggaccctcagaacacaggtgtctcaagggctgacccagcttctgtgtccttttctctgggtgaggaggggacattcatgggcagatggtgacctctggggaaggcagcccagactccactggccaccatatttcctttttcacaactttctcacccctgtggtttcccatgtcatcatgtggccgcttcccgcaaggccttagcggggtgcaggtatgaacatagtgtcaggcaaggaggcatctggaggggaaccctggcttttcctggggggactccctccctgcaccctagccctgtcctctcccatggctactgatgccttcccctcaccccagaggtggcccacatctgcacagatcagacccacaaaaatcacgtcttcctgactctcataagcctgcccagtgaggcccaggcattaggccatgtgctggggactcagacccacacatatacgcatgtcagcattcatgcttacaggtccgcacatgctggggcaagtgtcacacacggggcgctgtaggaagctgactctcagcccctgcagatttctgcctgcctggacagggaggtgttgagaaggctcaggcagtcctgggccaggaccttggcctggggctagggtactgagtgaccctagaatcaagggtggcgtgggcttaagcagttgccagacgttccttggtactttgcaggcagaccatgtggaccctggtgagctgggtggccttaacagcagggctggtggctggaacgcggtgcccagatggtcagttctgccctgtggcctgctgcctggaccccggaggagccagctacagctgctgccgtccccttctggtgagtgcccctcagcctaggcaagagctggcagcctgggttttcccaaagggtcatcttggattggccagaggaggacgccaggcacaagtctgtggtttatcattttccctgtctttctaggacaaatggcccacaacactgagcaggcatctgggtggcccctgccaggttgatgcccactgctctgccggccactcctgcatctttaccgtctcagggacttccagttgctgccccttcccagaggtgagcgtgccatcagcccagtggaggggcttaggtctgcatttatgcttttcctgcactctaccacctgcagataaaagggccctgccaatgcaggtttctctgtgttccacaggccgtggcatgcggggatggccatcactgctgcccacggggcttccactgcagtgcagacgggcgatcctgcttccaaagatcaggtgcagctggggtgtgggtgcagggcaggcagacgggcagcatgtggagtctggaacccaggagcccagctggcgggggcagccctgattcctgcccttgtgccctcattcatgtggcatctgtactaagcaacagccctgctgtggacagaggggcagcactggggataggagggtgcgggagaaagtgcaagactccaggtccaggcgttgtgggggtggggagaggtcgagctgggccggtctaataccaacccatggtcagtgggtgccccttccccatgccatcttgctgagggagggactggattgtgaggagggtgagttaggcctgcctaggagatcactgagccttagtgtcaccctcaaaccccagtagctgggcttgcaggccctggtgccaccagctccttgtgtgatgggggagtcaccttccctgagtgggctggtagtatcctgggtcatcttgtccacaggtaacaactccgtgggtgccatccagtgccctgatagtcagttcgaatgcccggacttctccacgtgctgtgttatggtcgatggctcctgggggtgctgccccatgccccaggtacaaatctgggggagatgggggtatgtggagggaagtgggggcagagttgggggccaggggcagggggtgaagacggagtcaggaccattttttctcaggcttcctgctgtgaagacagggtgcactgctgtccgcacggtgccttctgcgacctggttcacacccgctgcatcacacccacgggcacccaccccctggcaaagaagctccctgcccagaggactaacagggcaggtgaggaggtgggagagcatcaggccaggggctggggcggggcctcattgactccaagtgtaggaaaaagtttcctccatcctggctgcccctcacgtttgctcctcttccagtggccttgtccagctcggtcatgtgtccggacgcacggtcccggtgccctgatggttctacctgctgtgagctgcccagtgggaagtatggctgctgcccaatgcccaacgtgagtgaggggctggagccagcttggctgtgtgcccccagccacctggccctgacacgcaccttacaggggctctgtggcatggggctggctggctgcttgctgggagcctggctgatgcagggttcatgctaccccctagtgggggattggggcagtgccagccatcagcctggctgctccctgtgtgctactgagcctggaagtgacaaagacccacccctgtccccactcaggccacctgctgctccgatcacctgcactgctgcccccaagacactgtgtgtgacctgatccagagtaagtgcctctccaaggagaacgctaccacggacctcctcactaagctgcctgcgcacacaggtaccagaggcagggtgcagatacaggggtggggccccctttcctcccttttaggcctggccttaggatcactgcaaggtggtgtaagcggtaccctccatcttcaacacctggttccagctgtggagccggcaaagggttgatacccctgagggtccccagtgccacttctgacctgtcctctctgcttccctcacagtgggggatgtgaaatgtgacatggaggtgagctgcccagatggctatacctgctgccgtctacagtcgggggcctggggctgctgcccttttacccaggtacccaggggtggcgggtgggtgggctgagcacagtgtggcaggcagccgggccccagtgcccacctgcccttcttcatctgccctaggctgtgtgctgtgaggaccacatacactgctgtcccgcggggtttacgtgtgacacgcagaagggtacctgtgaacaggggccccaccaggtgccctggatggagaaggccccagctcacctcagcctgccagacccacaagccttgaagagagatgtcccctgtgataatgtcagcagctgtccctcctccgatacctgctgccaactcacgtctggggagtggggctgctgtccaatcccagaggtatatgggaggggacagcatcttggcctgggcaggtgggtggccaagctcctattgctttctgccctccgcatagcccataggtgatacccagctctgacagattcgtccccagctggaggtgctgtaagcaggagaggcgggctggagtaggtaggggctcggcactgcgccccacatagtggctacctacaacgccctttcctgcccaccccccaggctgtctgctgctcggaccaccagcactgctgcccccagggctacacgtgtgtagctgaggggcagtgtcagcgaggaagcgagatcgtggctggactggagaagatgcctgcccgccgggcttccttatcccaccccagagacatcggctgtgaccagcacaccagctgcccggtggggcagacctgctgcccgagcctgggtgggagctgggcctgctgccagttgccccatgtgagtgcctccctgcctgcccctggataggggagctaagcccagtgaggggacaggaacataatgccattctgtgctcccttccccgccaggctgtgtgctgcgaggatcgccagcactgctgcccggctggctacacctgcaacgtgaaggctcgatcctgcgagaaggaagtggtctctgcccagcctgccaccttcctggcccgtagccctcacgtgggtgtgaaggacgtggagtgtggggaaggacacttctgccatgataaccagacctgctgccgagacaaccgacagggctgggcctgctgtccctaccgccaggtcagtgccaacccccatcctggggctgggtatggccagggaccaggtcccacctcgtccaaccctctcgcccccctctgaccatccagggcgtctgttgtgctgatcggcgccactgctgtcctgctggcttccgctgcgcagccaggggtaccaagtgtttgcgcagggaggccccgcgctgggacgcccctttgagggacccagccttgagacagctgctgtgagggacagtactgaagactctgcagccctcgggaccccactcggagggtgccctctgctcaggcctccctagcacctccccctaaccaaattctccctggaccccattctgagctccccatcaccatgggaggtggggcctcaatctaaggccttccctgtcagaagggggttgtggcaaaagccacattacaagctgccatcccctccccgtttcagtggaccctgtggccaggtgcttttccctatccacaggggtgtttgtgtgtgtgcgcgtgtgcgtttcaataaagtttgtacactttcttaacagtgtctgatttgccgccctgcctgccctccccagggccccagaacaggggttcacgtccactgccaacactcccctcccctaccccacagaaagacatacacagccttaacctcaccagttttatatttgctgctgcccacatcggctgtatcacattaccccctagtccccagagctgtcccagccaccagccctgtgacatcgtagcccagagatgggctagtcagcaagcagcaccccctcccctcccaggggtccacaaagaacgccccctcccttcccagccctcacactagcagctgaggctgggtcacccctcctgctttcccacaatagagctttctatgtacagccacgtctacacaggcactgcttccccccagccctcctccccggcacctccccgtgggggtctggaccccccctcctccccggcttggaggcagacacagggtcccttgcaagacacgacccagcaccaaccacggaacagctccaaggcccctgggcccctctccggcctggggctgggagctacgcgcgagggcccccgcgggcccccggggcgcgcaccctgggtgcgggcccgcgcgggaggggcggtgccaggccctgcgcgggcgctacttgacgttgaacaccatcagcggccgctcctcccgccgctgccacgggctcttcttgtctcccgcctcgtcgcccacctccgcccccagctcgtcctccgggctggtgagcgagtcgcgccgcagctcgctggcgctgctgcgggagctgtccccgcggctgcggccccgcccccggggtaccgtggccgcccggccctcgggcgccgccacctcgtccagcagcggcgtcagcgagttgtcctccggagagcagaggcccgtgcggctctcgctgctgctgggctccgtgtcctcgctgagcgccaggcgcgggggcgcgggcggcggcggcggcgcggcaggcggggcgcgctcccgctcctccctcgcgggccggcggcgcgcgggccgcgcctcgtggacatctacgcccgagtccaggctggcgtcggtgctgcgtgccccgccgcccgcctgcaggtcgatgtaagagtggcgcacttgcgagttggagcgcccgtcgagggacacgaaccaggcgcgcgggtgcggcttcacgcccagttccagcagcttcttctcggtcagggcctgcagctccccgttgagctgcgccatggtggactcgttgaatagcacagggatggtgactgagccactgacgggcgccgcgcgcccggccccccagccctcgccgccgcccccgccgccctcgccccccgggcccgagtggcccggcatctgcgggcgctgggggtcgggctggggaaaagcgcgcgccgggccgggtgccgtgccctccggcggggccggctcgtcgcccacgccggcggcgcccgcctcgccgccgaggcgcacgtagtgcgcggggatcaccagggtgggcatgacgttgcggtagacgttgtccttgaggtggtcgatggagccgcagaagatgagctgccccgcctggcccagcgacggcggccgcgccagctggtccaccgactgcgacagcaggaagtcgggggtcttgccctcggccgcccccttgtggcccaggtagtggtcgaagggcggcggcggcgagggcggctcgtgcaggaaggccgcagcccccgagggcccccgccggtgctcctctaggccgggctccagcccgccggggccctcggccgagcgagcgcccttgagcccggcgctctcgcccccgcgggcacccgaaggctcggcggccgggcggctggcagagcgcggcttggtgcggaagaagtcatcccgggaggaggccaagtcccgggagctggagaaggccgagtggagggggcctggaggcggagcctcggggtcccccgacggggcgggttccaggggtcccccacagatgaggtggagctgggacatcgaggtggcctggtctcgtttgttaccgtcagagggccccgagagctgcagcttgcggtgctgttgcctcggcttcaggcagcgcctcctggaagggagggagcagaaggggccgctcaggaaagggtgagggccaaagtaggccccgaacccccttagatgcaagacaagagacgaatatagtggaagaggtggggagaatgcctggggcgctcaggagagatggcggggagccgccgtgtccgtttggcgatcccctcagggtcaactctgcactcctctgcatgtaggatgtgctgcgagaaccagggatgagcatctaagctgtctatgggtgtgtccggcctggagtcctctgggagagagagctgggctggtaggggcagtggcagatctctctggaggggccgggctgcaagtccttaagccctgcctcccctcccacctccccgctgtcttcaaccaccagcaccagcccttcaggtcttagcatgtttgcaggaagtcttttcctgtctgccccttgaggaccagaagtggattttatgcatctttggggccccagggcccggtacaagtgcaggggagggtgagggaagccccgtgctcaccggcagtagtagatgagcagacacagcaggataagcaccagcagggccagggctgccaggatggtgagcaagaagatggtgtggtaggtgccgatgtcctggatgcccgacgtgatggtgaccagccctgtgccaggcgagggcttagcgttcaggtgtagacacccttcctgcctttcagaagtctgctctcccagctcccctcctccgcggcctctacgcccactgccccactactcttaccagccgtgggggaggccatggcggccacccagtaccccagctggggggagacgaaggtccagtagagctgccggccttccttccggattacaccagtgccattgcgcacccacagccctgggagaggcaggggttttgtcacacttgagtcgctcccactcaagtcccactttcttctctcaactcaagcacctgcagccccctgaggcacttaccactcttggggtcaaatctccaggctggaatgctggtgcccacggtgagggcacgagtctcggagggcacgggcagggacaggtgaatggggcctgagagcggcacctctgtcccattacctgtcagcaggtgcacgctcacagcagtcaggggcatcagctccagccaggagccattgcctgagggaagagggtacagggctgagggctgatcctgagcctggggagaccccatccgtgctgggcacccagcctacctgagctggaggcctcagtgcccaggaaggcagggaaagcccgcatttcctgctgggtgctggcaggcgtaagtgacgcccagagctggctgtaggtggagctgacaggcaggcgggcagcccggcgctggaactgcaccaagggctgggagcgggcacctggagggaaagaggggctgcagtggcttgaccatggacagggatccccagggaccagagcagaaacccattatctaaggaaaagggggacatgaggtcaggccactttggaaggccagggagggtgatgccttggggagaaagctgggcagtcatggaatgttaacctggaagggacatggacctgaaatctctgtgtgaccctcagcaatttacttgttttagtagaaagtttccttatagaacctataaaatgttgcgatccagatcctcaaacagtattgtctactatgtggcaggcaccaggttagacactgggggcccaaagatgaacgtctgctgtgatgggaatgttttctaggtgtgctgcccattatggtacccactggacacacgtggctgttaagcatttgaaatgtggctagtgtgactgaggaactggatttttaatttttaaaaatgtaatgatttttttctaggtgggtgcagtggctcatgcctataatcccagcactttgggaagccaaggtgggtggatcacctgaggtcaggagttggagaccagcctgaccaacatggagaaaccctgactctcttaaaaatacaaaattagctgggtgtggtggtgcattcctgtaatcccagctgctcgtgaggctgaggcaggagaatcacttgaaactgggagggggaggttgcggtgagctgagattgtgccattgcactcctgtctgggcatcaagagcgaaactccatctcaaaagaaaaaaaaaaaaaaggccgagcgcggtggctcacgcctgtaatcccagcactttgggattccaaggcaggtggatcacgaggtcaggagttcaagaccagcctggccaagatggtgaaaccccatctctactaaaactacaaaaattagccaggtgcggtggcaggcgcctgtaatcccagctactcgggaggctgaggcaggagaatcgcttgaacccaggcagcagaggttgcagtgagccaagatcatgccattgtactccagcctgggcaacagagtgagaatccatctcaaaaaaaaaaattaatgaatttttaatttaatttacttcaatttaatatgtagctagtggctactgcattagacagtttaggtcgtgtgtgtgtgtgtgtgtgtgtgtgtgttggggtggaggggacagacatacaaacaattccaatacaatatggtcacagctaacatttattaatctttaagctatgctgggcactgttctaagcaggttacctatattaacccctgcaattaggaaaatagcccctgagctaggtatctattatcaacctcattttagaggtgcagaaatggaggcacaggggttcagtaacttgcacgaggtcacaatcctcgagcccggatagaagcccaggccatcgggctccaggcccatcctctgccatgccattcctcctgccttgctatccaaatagagggatgcagaggactaggggagctggtctcactcagctcaggggaggccctgtggagtcttggaggatgtggaagactcagccaggaaagaaagagggaaaggacatccaggaggcctggcatgagaaaggcccagaggcgtggggcagagggcggcccgggctctggagggtgcagtcagctctgagatggcacctgggcttggtactgaaagcagtaggcgccatgcaggggcttcaagctagggggccacaaagggtccactggtattttagaaacctgcaggggcacttagaagcttgggatcagagtgacgaaggtgagcaaacaagagcagcttggtgaggccgggtgaagtgactcgcgcctgtaatcccagcactttgagaggcagaggcgggtggatcacctgaggtcaggagttcgagactagcctggccaacatggcaaaaccgtctctactaaaaatacaaaaattagtctggcgtggtgatgggtgcctgtaatcccagctactcaggagactaaggcaggagaatcccttgaacccagaaagcaaaggttgcagtgagccgaggttataccacttcagcctgggcaacagagcaatactccatctcaaaaaaaaacccaacaacaacaacaacaaaaactagctccatgacaagggctcaagctgagactacaaactgggatggggttcctcaaactccgaaacccaccatggccctctaagcggaatggagcccccaaaccctcactgtcctctactaccctccacctgatgtctccccctggccttcctctccagtggaggtgcctctgcttccccttcactcctgagtcgagggctgactgctccgttcgacaagctctcacccagccaggtcccctcgcaggttagggccgtctcagcactgaaagcagctgccctccactccactgccctgcctgctctggaactatttcagggcttgcaatgatctgtcttcctacttgtctgtgaacgtccaaaggcaaagagcgggtcttcttcctcaccgtggttcccagcaccagccacaatgcctggcacagcctaggagttgaagtaagtactagctgagcgagaccaaaagcctgggggtagaccaggaactgcaggcttgctctgggccttgcacttcctgtgcacctgtgcatccagcaggtgcacaacaaatctgtgtagacccattgaagataaaggtggcagggaaggtaggaatagatggagaatagaaaccacgagaagccccgataactgtaaacatttattgaacaccttctgtactgtgttttttcactttgtgatttcttactccaatttgatgatgtaggcactaaccttccacgtcttacaaatgagcaaattatggctcagagaggtgaagtgacttgcccaaggacacccagctaatataggacagtggaggtctctacacctaggtcaggggaaggaagaagagttggcgtgggtgagggggagccttaccgggagagcctaggagaatgtgcaccaggtcctcatagaggatgagcgtggccggccgctcagggagcaggtagaggctgacagacgcatacactgcgggagggatggccggtcagctccaggaaaacccaccccctaccccccagccaggcaccccctccatctgagtcccagaggcttcaccctccctcagccccctctgtgtaccccagcccaggcagcagctgctggaaagcctccccctccacccccaaggagactattttgggaaggggctgatggagggtcagctgctgtcccccccctccacctgcccctgcactcacagggcagcttgtcaacacgccagggcacagagttggtgaggaagccagggcgggcagcagtgaccagcacccaggtgcccaagcgataactgaggggcagggtggccacaccctctgagtctgtggtgccagctgccagcagagtccggttcccaaacacatccactgaggcccgggccaggggcaccagctccccgctcacatacacctgcaccttgatcaggatctctgtgggcaagatggggcaaagggagtgaggacgagggagggggaaagagaactggggggagccccaagatcagaggaaggagctgtgtttgagagagtcttttgggctgaggctagagaaggcatgatttaagacccagcattcacagagcactcactgaaacctcctatcagcccatgccggaggtgggactattcctgtatttcatcgtctaacacatgcgctgtgtcacattttcacaattctaaactcgggctatgcctatgattgatgatgccatcgttataactggcagcatttcttcctttcttactggtacctgaaatcatggtgcatcttacagtcagtggtgtattggatttgataatatatgctcttagtccattttacagataaggaaactgaggcttagagagtttagatacttggactacagctaagtggagatctgggatccagacctggcagtctgcctctagaagcgacattcttaaccccgggcctggggagaggagaaggacaggagggctgagaaaggctaagtaaagctgggtccgcaggcggagaggagaagggtcaagattcagcagtttgaaagggaggatggaggctagggcagagtttggggtcttgggaaaaaattgacaggggacactaggaaactggtcattcccatcattcatccttttcccagaatcctttgcacaagcctgtttcccttcagatttagggactcaccccaaccccatgcccaaacaaattacttctgcctcctccccctcacatgaaccgcctgccccctcccagctggtcagctacagtcagtcaccatggcaacgccctcattcctcccaggagatcaggcagggagctggggccctggtaagggaaaggagatctaggggggagcaacccaggcccaagagaactattgtggagggggctggggagggaagcccaagtcttttgctttccagggatgcctctgcccacagcccgtggagaatctggccaggccatcaggcaggcgtcctgccctcagatggcgtgatgggaaggaaccaagccttgagttgttcccatggattctccaggcagtctctctgatccagggcaccccttcccatcagcacagcccctccctcaagaacacacttcgcccctaccttcctgctaacaaggtgtgtcatgcatgtatggacacctcagtggggggcccaggagacaggtgggaagtgggctgagtgctggatgcaaatctagtgggggttgggtatggaaggaagagtctggagctgagagcagcagggcctggggaggtcagggtgctgtggagacttcaaggagagggaaggccttagagtggagcctgacactcagcagtgacaggtgtcttagctcaggctcccaatccgcagccagcgccacgcctgccctaggcatcccatccagctgttcccctgagcccacctcccctcccaggccagagcccaaccctgcagggtgggtgcacactccactcactctcgctctctgctcctccaggaagctggcacccctttactgtttttttgcacatttgatgtgatttaattcttacttcaatttgatgatgtaggcactatccttccatgtcttacaaatgaacaaattatggctcagagaggttaagtggcatggggtggggggaggtagagcctaggaggacgtgtgcaaggtcctcatccatccccctgccaacacccattaggaattcggagaagctagaaggtcctggctactcccacctccatcccgggcttaggaacagctggatagagcagctggggagagggatcccgagtctgagatatggtcatttgagggaatgccttgggttcaagagtcagagtttcagaagagggagggggctggggaaacaaaactggggtgggctggtaaggatctgtgccaaccttgcgggtgggggagaagggagggggcaggtgcctagcagattcccttccccctttccctcaacctgggctccccgccagctgccccagagaacccccaatcctggctctattccagccaattccctgggccccttcccctgaggtgcagggacttgaggggaggggcgtcctaagaaactagggcttcttcctactaagaaaagcctgatctcctccccgagagagctgggggagactgaggcagagggtgaaccctacccattcctcgaagcctgacattccatatagtatccacctctcccggctctaggcctgcctcagtccaggaggaaatccgaccccctcccttcatccggaccccacttccctcatccagacccccccactctgcttttcctgccagctccttagtgtggggggtgaggagtgaatactgcttcaggcagggatggggcccacaggcaggagagggagagcaggacccgggaggtggactcaggactggagtgggcggaggcccccaagcgtccaggcctgcctgtgggatgtgttgtcagggtcttgctcccccaccctttcctgctgcaggagccggccccacccccacctcacacacccacctgcgcccggtgagtcgctgggaagggtctcctccactgcgaagatgtgagatgaggagggggtgatatgggggcgggcaggggacaggaatgccaggaggcctgctgaatggggggggacccaggcacctgccctcccagccggcactgcccacagccagctagctcagcatggctccacgaccacaagcctgccatgctccctcagctgggaatcacaatgtacccccttttcttagaggcccacaactgcggctcgtcctccatcataggctcacaagcatttatttggtgcaccccaaactctaaaccaggggggctggctgggagctgtcaggctccagggcaaagaaccccattagagcagtcaatcccgcccacagcctcacccactcccccttctcccctccccccttcaaacccagctccaggctcccagcctccggtcccggcctagggtggcagcggatgccggcgcccccaccccgccagggtcgggagcgagcaacccgcagggggctgcggagcaggcgcccgccccagcccgcccctgggcgggtgtcttcggtagacaatggctcaggcagcagcgcctcgcggaccaggagggagaaaaacaaatagggagagggcggcggcgcagatcctggggaccctcgcactacccattgtgtctccccaagacccccgccccggacggcctccctctccccgcctccactttcccccagaagcgccaaccccagatcgcttagctccccccacccgaatccagggaacagaataccactcaattcacgaacgccgcgaagagggggctgacgggcgggagcctgatcagggggcgcaggcccgcgatcgcggcccctcccggctgagactcaccctgcgggctggggggctccggcggcgacttgccgggagcccgggaggcgctgccgagcagcagccccagcagcggcaacagccgcgcgaggacgctggggccactcgccggcggcatcgcggggctaggccgggccctagcggtccatggctcccgcctggtcccgctcgcccggccccgcgcagccccagctctgcgccgcgcctcgcagctccggctcccgctcccgctgcggcgcccgctcagcgcgattgtctccgaccggagccgccgcaagcgccccctgcaggcggcgcgccacaccgctggccctccggcaccgccccctcccggccccgctccgcccgccgccccccggtactgcccaccttcagcccaccccgcagcccccgcgctctgcgctcccagactctgcgctgcaaaggagtgtcgggattagggtcccatcacccgggttcttgggtttcgagagtccccaaaatttggtgcaaaatttgtgtgtgtgtaggtggggagtggatattgcctacaacactctcaaggggtacggtcatgaaagtctcagaaaactgtaagaactccctgctcgatggcccccttctcccggtagaacacctaggcagtgctggggtgatagcagggaaggccccctagacccccctaagtctctcttttttttttttttgagacagatttttttttttcagagacaagtgaacatttatttttgggcctttcttcctatttcaagtctttttcaaaacaaggccccaagaatctccaaattcaattatgtccctgggcttggccgactggtgcaggagtcttagggagccttgtacaaatgctagagttactcacttaccgacattaaactaaaacgctggaatttttccttggaaactggactgtgattagaggtgcttgccatgaacataagctactgtttcttctccttctttttttttttttttttttttttgagagagagtcttgctctgttgcccaggctggagtgcagtggcgtgatcttggctcactgcaacctctgcctcccgggttcaagtgattctcctgcctcagcctcccaagtagctgggactacaggtgcacgccaccatgcccggctaatttttgtatttttagtagagacagcgtttcactatgttggccaggctggtctcgaactcctgatctcaagtgatctacccgcctcggcctcccaaagtgctgggattacaggcgtgagcttctgtcttttctttgacccttcctttccagtttttgaagataaagctggaaataatcttctctgaagatacttgataaaaattcccaaaaaaacaaaaacacatgcttctactacccatgcttccacttcattaataaaaatttactgcagtttggcacctgggtctagttcagctggcggatgagctgactgatgcgttcaccctgatagccaggtgtgcccatctccttgaggaagcccactgtatttttggtagcatgacgggccactgagaggtagaaagggcgtaacaaccatgagacctcctggaaatgcttccctgggacggcaatttcatgactgaggtcttccaagcaaacgacaccaaacttccccaggtgcttctcaatcactgtgttgtctgtcagaggaatggtcttattccttattcctgaccttggcttgtccatgtttcaaaatgagttcctggacagacttcagatttggaaatccccaggtcacataaggttccaccatacgcagcatttttaggttctggggggtgacttttacaaagacaccactaaaaattttctttaggcaaagtcttacaatggttctctgcaccagtaaactcacgccatcaattctttcgatgtgtacaacaaaggccaaggaatgtttatctggcaattccaaggcatgatgtttcacttctagttgtctgagatgcactttgtcacatttctgccatcaggaatcatgtaggaatgattccagttgcttaaacctgagcccttttcctttcctctgctctttctttgacaaaagtgcctgctttgcctgggtggctttgagggcttggtaagcctttttttcaggagattttctagaaccaaagggatttttctttgctcttgctcgccatttttctagtgttgcagctaccgatcattaagacagagtcttttgctgttgcccaggctggagtgcaatgatgcaatctcggctcactgcaacctctgcctcttgagttcaagagattcttgtgcctcagcctcctgagtagctggaattacagatgcctgtcaccatgcccggctaatttttgtatttttagtagagatggggtttcaccatgttggccaggctggtcttgaacttgtgacctcaggtgatccacccgcctcagcctcccaaattgctgggattacaggtgtgagccaccgtgcctagccctaagtctcttattaagccattggcaagatattcagccttctggtcttcagtcttcctttaaaatgggagttgtcataatctctacctcatagggttgctgtaacaactaaatgagatgtaatggccaaataatgatgtcaaaagagtctagcacaagcctcacaggagcaggggcgtaataaatgctgttactgttggcccagggtgaggtagggactcacctgtgcccaggtaatatgatccattgctgggcagtgctaatggctaaggagtgtttccagggctggcagcagcctttctcttccaccagttggtgattctcagtggtcttggttctggctttgtgaatgataaactgggtctctcctttgtcctcagccattgaatcccatatttgaggacagctattggcttgccctagtcccagccaagctctctttccttccagttcaatatttctggttgtcatcatcaatcagtttccacctggccaaatccttaactggtatctcttccctggttctctctggtttgtcaccttctctttctcactgtatggtggccaagaggggactggatacctaaggcaaggaccccatttcccagagaacagcaaccctcctggttgggtcttctgatttaaggggacatcattataagcttgtggacagaatgaaaactgccagtgtatctgtctctcttctttctttctcccttccttcttcccttcttcttttcatttctctctctcttttcttttctctctctctctctctctctttctttttttgatggagtcttgctctgtcacccaggctggagtgcagtggctgcgatcttggctcactgcaacctccgcctcccgggttcacgccattctcctgcctcagcttcctgagtagctgggactacaggtgcccgccaccacgcccggctaatttttttgtatttttaatagaaacggggtttcaccgtgttagtcaggacggtctcgatctcctgacctcgtgatccacctgccttggcctcccaaagggctgggattacaggtgtgagccaccgcgcccagcctctctctgttttcaacagaaatttccatctcaccagatttcccagtgctattcttatgtaaccagttttttggaacctcaacacaagacttagcactcatccctggtgaatttcatcttgttggtttccacccaactttacaatctgtcaaggctgctttgaatctgcttcagtcacccattgtgttggagctccctcccagccagcagccatctgcagggtgaagatggcttcctctacctccattcaagggactcataacaatgccaggcagcccagggccaggatggagcttcatagagatctccttcagctttatcagaattgttcaggtctaaatccgagtccctaggatccagctcacatttacgtcttgtctataaggacaaatgccaaatgctttgctggatcaagataagttgtctggagccatccaatcgcaatgacagaaggaggaggcaatttggctggtattcaaggatcacggcttaatcttttcttaaatgcattcagtcacccaaatagaaacctgttccgaaacttgccatgcatggatgtcaaaatattctcttcagaatttactatttacacctttgggtagaatcaaataccaacagctcttgctgttgtattgttcatcaatggcttcccccaacacttggcgtcaagtccaaagtcctccccatggccacggggtgttcctgcccccatcccccatctcctgaaccctcacccacacctgcctccagccacatgggcctccttgctttttttgaacacactaagccagctcctacctcagggccttttcactggctgctctttctttccagaacattttatcttcatgtagctgcatggctcagtcattcatctccctgcttatctcatcaaagaggccttccctgaccaccctacctaaaatgttagtagcacccctccaaacacccactatatatataaaaatatatatatatataaatatatatatatatatatatatatatatttttttttttttttttttttttttttttgagacggagtgtcgctctgttgccaggctggagtgcagtggcacgatcctggctcactgcagcctccgcctcatgggttcaagtgattctcctgcctcagcctcctgagtagctgggattacaggtgcccaccaccgtgcctggctaatttttgtatttttagtagagacggggtttctccatgttggccaggctgttctccaactcctgacctgaggtgatctgcccgtctcaacctcccaaatgctgggattataggtgtgagccaccgtacccggcccacccacatacaatctatcactctctcgtcaccgttattttcactcacagcactgactgctactaaccatacatttatttgtttactttactttttacctctggaatgtaagttccaggagggcagggacgttgctttgttcactgctgcatctcagcactggaatagtgccaggcatgtggtagtgagaggtgacactgtgctggcagtcctcacagccctcgctcgctctcggggactcctctgcctgggctcccactttggcggcacttgagaagcccttcagcccaccgctgcactgtgggagcccctttctgggctggccaagaccggagccagctcccttagcttgcagggaggtgtggagggagaggcccaagcgggaacccgggctgcgctcgctgcttgcgggccagctggagttccgggtgggcgtgggcttggcgggccccgcactcggagcagccagccggccctgccggccccgggcaatgaggggcttagcacccgggccagcggctgcagagggcgtactgggtcccccagcagtgccagcccaccactgggccttagctgccttcctgcagggcagggctggggacctgcagcccgccatgcgtgagcctcccacccactccatgggctcctgtgcggcccgagcctcccggatgagcggcgccccctgctccacggcgcccagtcccatcaaccacccaagggctgaggagtgtgggcgcacggtgcgggactggcacgtagctccacctgcagcccctgtgcgggatccactgggtgaagccagctgggttcctgagtctggtggggccttggagaacctttatatctagctcagggattgtaaatacaccaatcggcactctatctagctcgaggtttgtaaacacaccaatcagcaccctgtgtctagctcagggtttgtgagtgcaccaatcaacactctgtatctagctgctctggtggggccttggagaaccttcatgtctagctcagggattgtaaatacacaaatcggcactctgtatctagctcaaggtttgtaaacacaccagtcagcaccctgtgtctagctcagggtttgtgagtgcaccaaccgacactctgtatctagctgcactggtggggccttggagaacctttgtgtctacactctgtatctaactaacctgatggggacgaggagaacctttgtgtctagctcagggattgtaaacacaccaatcagcgccctgtcaaaacaggccactaggctctaccactcagcaggatgtgggtggggccagataagagaataaaagctggctgcccgagccaacagcggtaacccgctggggtcccgttccacaccgtaagagctttgttcttttgctctttgcaataaatcttgctactgctcactctttgggtccacactgcttttatgagctgtaacactcaccgcgaaggtctgcagcttcactcctgaagccaatgagaccacgagcccaccgggaggaacgaacaactccagacgcgctgccttaagagctgtaacactcaccgggaaggtctgcagcttcactcctgagccagcgagaccacgaacccaccagaaggaagaaactccgaacgcatctgaacatcagaaggaacaaactccggacacgccggctttaagaactgtaacactcaccgcgagggtccgcggcttccttcttgaagtcactgagaccaagaacccaccaattctggacacagtaggtgctccgtgattatttatttttatttttaattaaaaacatttgtttttagccagggcctcagtctgtcacccaggctggagtgtagtggtgagatcaaggctctctgcagtcttgacctcctgggctcaagcaatcctcctgcctcagcctcctgagtacctgggtctacaggaacataccaccacacctagctagtaatttttatttttgagatggagtttggctcttattgcccaggctggagtgcaatggcatgatctcggctcactgcaacctctgccgcccaggttcaagtgattctccagcctcagcctcccaagaacctgggattacaggcacctgctaccacagccagctaattttttgtatttttagtagagatggggtttcaccatgttggccaggctggtcttgaactccagacctcaggtgatccgcccaccccagcctcccaaagtgctgggattacaggcgtgagccacctctcccggacaattttaatttttttttagagacagggtctttctctgttgctcaggctggagtgcagcggcatgatcatagctcactgcagccaaaaactcctgggctcaagcaatcctcctgcctcagcctcccaaagtgctagattacaggcatgagccaccatgcccggccaataaatatttattgaacccaggaaggaacaaatccctcaggactccagggagacctccccacatatgctgctcagctctactcaccaaagctggagagctgtcttccatcctcatctttcctggctgaaggcccctcttggtggggaggaagggacagcagcagggtagccagggagcgatgcttgctgtctcctccctggcatgacgctgccttcctcaggcaacagctgagccagccttcctctgccccttctcgctccaaacagctttaaagtccttttttgataggaaggcagggagagcgtgttatttttccacgcctcaggtcattgtaaagtttacccttccgaaatcataacaaatgtgctatttaaagctgccgtagctgggcgaggtggctcacacctgtaatcccagcactttgggaggttgaggtggacggatcacctgaggccatgagttcaagaccagcctggccaacatggtgaaatcccttctctactaaaaatacgaaaattaaccaggcgtggtggtgcactcctgtagtcccagctactcaggaggcagaggcagtagaattgcttgaacccgtgaggcggaggttgcagtgagccgagatcatgccattgcacagcctgggcaagagcgagattctgtctcaaaaataaatacattaaataaataaataaagctgcccaccaaggacacagcctgccttctctgatgctcccatccccctcacctgccctcccatcccatcctgcccttagacatgttcatccccttctagtcttccctgaggccctgccgccctttctccctcttttcttttttttttgagacagagtttcactcttgttgcccaggctggagtgcaatgatgcaatctcagctcactgcaaactctgcctcccgggttcaagcgattctcctgcctcagcctcccgagtagctgggattagaagcatgcgccaccaggcccagctaatttcgtatttttagtagagacagggtttctccatgttggtaaggctggtctcaaactcccaacctcaggtgatctgctcacctcggcctcccaaagtgctgggattataggcgtgaaccactgcgccgggctctccgtcttctgttacacctaccaccccaactctgtactccctgacactccccaaagacagtgatttgcaaacttcgccctggcagtgactctctcgttcatacttccaccagccctaggtccccgtccaaaacattccttcggtcatctcttctctggccccaaaaggaggcagcatgctcagcatcagggctcagtctctttattaggcagcaggagggggggtagcccagctctgttgggagggaaacgacaccaagaggacccaatggaacagctccaacccaaagcttggaggcaacttgttggagaaggggcggtgcaggtagcacgcccaaccctcctgctagaatagtgtaggctgcaccatcactccccctcttcatcatcttcttccaggggtggccggttccgcttgaagaagccgacctgggggtacacgggggccaaggtcagggtatacagatgatttgctggccccagagcacatgtgaggaagtatgctagctatgagcacctccctggaccagcgcagaacatgaagcccactgtactcacaaatggatgccttttgacatttagagataatgcatggaacgaattgttgggtttttgttttttctcccctgagtttttatttttttcttttttttagagggagtctcactctgtcacccaggctgtagtgtagtggctcgatctcggctcagtgcagcctccacctcccgggttcaaacaattctcatgcctcagcctcccgagtagctgggtttacaggtgtgtgccaccacgcccagctaatttttagtagagacagggtttcaccctgttggccgggctggtctcaaactcctgacctcaggtgatctgcctgcctcagcctcccattgtgttgggattacaggcataagccactgtgcccggcctctgaatttttcttttttattttatttttagagacagggtctttctgttgtcacccaggcaatcctctcacctcttagcctcccaagtagctgggactacaggtgtggactaccacacctgactaattttttttaaaaaacttttttgtagagatggagtctcactatgctgtcccaaactcctggcctcaagtgatccaccgcgcctggtccccacctggaatttttcttttcttttcttttgagatgaaatctcacccaggctggagtgcagtggcacaatcttggctcactgcaaccttcacctcccgggttcaagtgattctcctgcctcagcctcccgagtagctggaagtacaggtgcctgccaccacgcctggctaatttttgtatttttagtagagatggggtttcaccatgtttgtcaggctggtctcgaactcctgacctcatgaaccgcccacctcggcctcccaaagtgctgggattaccggtgtgagccaccacgcccagcctggaatttttcttatactgaagtttgtgtctgcatgactcgagcatatgatgatatgtatttgattattgtgggtctagtgcgtggttttccctaaaagcaccatgtcttcccttcagtgtgcttgagactcctccaggtgcagaggagcgagtgaccctccagggccacataggaagggaggaatagggtctagaccaatccttgggcctcttgcctcactcaaggggaagggcagggctaggaagaagtgcatcttgtccttgagaccagccaggaattcctgaaggcaggacttacaccctctataccctctatatcctctgaatctttttggtggcaggggtgtctaaaggcctcagaatttcaggtgctatcctttccagtggtatgtgtctggaagggttcccaggagaatgacatttttgtgtttgttttgccttttttgctctactagagaaagacattctatttttttcttttttttttgagatggaggctcgctctgttgcccaagctggagtgcagtggtgtgatctcggctcactgcaacctccgcctcctgggttcatgcaattctactgcctcagcctcccgagtagctgagattacaggcatgtgtcaacacgcccggctaattttggtatttttagtagagatggggtttcaccatgttggccaggctggtctcgaactcttgacctcaggtgatctaaacgctttggcctcccaaagtgctgggattacaggtgtgagccaccccactggaccgagaatgacattctaatagtggagacatagacccctggtccctggattacccacttgggtgggccaccatctctccttgactccctgtgaggcagggcagagccaagcctgtgccccgctggggactccaccgtccttcacacctcaccttccacatggccaggaccaggatggtgagcagcagcaggccacccagcacacccaccagcacccaccagattggaatggccctctcctccaaggcccggagcagctgtgtccacacctgggggcaaacccacgtgtctcctcagtcaccttgacacctgcctttcacaaagactcaaacctcaggctggtgacctccagccatgccacccacccgtaccacccctcagacttttctggctgggcactgactgggggacaatgggtcctgcaggactggtctctgctccatccccccacactcacctgagcttcccctcggggcaggctgagcgggggcaccgcataggggagggaggacacgttgaaccatgcgtgcgactgcagcacaaactgatccagaggcctctggacaggttggggttgaaagccgtttacacccacaagaggcctattggttgcaggagtccaggtcccacacccccggcggggaagccctgcctctgacctaatcccactgcaatcccccaaagtaaaccttgccttccctctcttcctgccctcccacaccaaaccccgcccctcccagagcaaagtggtccccgcccagaaggcccggccccgccccaccacggcccaccccacctggtagaggctgggcagccacaggaaggccagcaccgtgaccatggcccgctgcccgcgcgccatctcctgcaggtcacactgcaccacagtacagggcgccgagtcgcagctctgaggggaagcatcgtcagtccccagcccgtcccggcccatcaccccatcatcccccacccccttacccccaggacccaacgcagaaggggccgggggttcaggaagcggtggccttcccatcaggaagggccttggatccaagcttcggatgctgtctttccacgggcttgctcacatagtcccagagatgcagggagggtcatcccccagcgcacaatgctcagatctatgataaccttgctttggcattgttttatgctccttaacgtactgggaagcttttaaaaagtgcaagtgtctttcagctcaccccagacacaagccagcatgctcctccatgttcacttgaagtgctcccagggaccaagcgtggcccacagaggcccacagcacacccggacccctctccctcctcccatcccctctgccccgtgggtcccggggaggccgggccagagaccagagagcctgctcactacgagaactggatcctgaagcctcgagggctgctcgggctctggcaggaagatctgtctgcgatcccgcttgtgatgggccgggtgaatgggggaggggctggggatgggcagcccccagtccacctgggggggcaaaggagtggtcaggcccaggtctcccccgaaccccagcccacagaggtgccccggtggttggtctggggccgccttcccaggtctttcttccacccagctcttaccttgagagggttgacaggaggctgtgggaagcactgaaggcccccctggggctgtatatccaggatgtagagcaggtcggagggctgggactgtcccggaaggtggatgctgaggtgaagaccattcacagtcccagggccattgttgtggagctgaaggggtggtggtggcagggtgtggggagcttagcgcctcacccggagttctgaggacccgctcaccccagccagggacgcgaggctccccaatacctcataggtgtgctccactttgggtccccagctgtccaagctgttctgctccctctcaccttcttctgctgccaccaccagggaggctggaaaggagttcctgcaggtgcccaagacccccagagagagtgtgatgccctgattggcctgtgaggtttccccagcgccccctggagtttagagccctgaatgccatctcccttctccacccctggcctctcaccctcgcagctccacttgggcctctgcccggaccggcacgtccagcagcacaatcttgctgtttggattctggctgttcttgctagaggggaggggatgaggagaaacagggccagggacaccagcccagtgactttctgggggtgaggccagaattttagagagttcagagagagctaattatacaaagagcatgccacactgaagttagacctgggaaagaacttcctctagggctccaagactcagacataaatctctgaggaagaaagggaaccaggcttcttcaaagacctttttttttttcttttgagatagaatctcgcactgtcgcccaggctggaaggctggagtgcagtggcccaatctcagctcactgcaacctccacctcccaggttcggttcaagctattctcctgcctcagcctcccgagtagctgggattgtaggtgcgcaccaccatgcccagctaatttttatatttttagtagagatggggtttcaccatgttggccaggctggtctccaactcctgacctccagtgatccttctgccttggcctcgcaacgtgctgggattacaggtgtgagccactgcgcctggcctcgaaagacccttctgtatggaagggacctgaggggctctgcacgggggtcagacgggggaagggtggtgggtaggcacgctcgccaggtcagtacctccgtatctgcagctggaaggacacagactccccagcctcttccagattccccacgctcaccaacatcgcgattcctatctgggagatgaggagggccaaggtcactgcccaagtgccccacttaggacagccctgccctgaatgtggcctccagtcttcaccctccaagatcaccactattctttttctttttttttttttccgagacggagtctcactctgtcacccaggctggagtgcagtggcatgatctcggctcactgcaacctccacctcccaggttcaagtgatttttctgcctcaacctcccgagtagctctgactataggcgtgcgccaccatgcccgggtaatttttgtatttttagtagagacggggttttgctatgttggccaggctggtcttgaactcctgacctcgtgatccacccgtctcggcctcccagagtgctgggattacaggcgtgagccaccgcaccaggccaccattattatttctattttacctggaagcccactgggtaaaggggctcagagagggaaagtcactcacccaaggacatgtggcaagggagtgtgaggaccaagattctggcccagaactatgtggctctaaaacctcacccctaaaatctggttattcatgagcccctggtggagacccggtaccacgacccagcagcctcacctgggcgttcttcttcatggggttgcccagctcacacagcaccaccctggtctcattctccttcttctgattacagatgagtctctcaaagcccttcaggaaggcagttccaagaaagaaattacagagcatcatatatatatatttaagctcccttggaaggtctggaaagatttgtgtgccaaggtagggaggggggggtttcttggggtggggtctcaagggactgtcacatgctagtgtgtgtattgctgtagcactactactttttaggcattttcattttggaaataaaaaacacaaaacattagagtatgacccccattattataaactatattaacaacataaaaaataaatatatacttatgtgagtgtgagtcaatattgaaaaaaagactggaaggaaatccaccaaatgttaacagaggttcctgttaacatttggttcctaaaccttttttgtttttctggtttttgtaatagagttttggaattctgtgccattagcaagtattcctcctccaaattaaaaaaaaaataaaaaattacatctttgacagcaaagcagaagagaagagggactctcagggagggagatgagagagccaaggctccagtgcctcccaggtcccgggtactgttcccagggtgggggccatacctcgacattgcttagggcccgcatgtagtgggcgccctggggcaggtgcacggccagctctgcttcataggccccctcgccctcgttggctgcgtccatctgcagctccaggacattatctgccccaactaggagcggggagcccgtcctgtggggaaagaggagtgaagccagggagcctgggtctgggcccaggatgtgggaaaagaggggactaaggtgtggagcaggtatgataggcagaaagggccagggtcgggcagaatgggaggcctcctcacacgctggcagtgagctgaagctggggcacacatacgtcatcttccccacagtccaggacgattcgtgtctagaggggcacattggggtgtgcgggtaagttggggatgtgtgaggtttagggattacatcagggttaggaaaacagtgggcttggggttcacataggggcttagggagtaagaagatctgaggacgaaaaggagtttgtagatggtatcggggctcgggtttatttggaggtttgggacaatgtcagggtttgtcaatttacatcagagcttaggggatactgggattttcaggtgtttattttatttttggagacggagtctcgctctgtcgtccaggctggagtgcagtggcactatctcggctcactgcaagctccgccccccggggttcacgccattctcctgcctcagcctcccaagtagctgggactacaggtacccgccaccacgcccagctaattttttttttttttttgtatttttagtagacggggtttcactgtgttagccaggatggtcttgatctcctgacctcgtgatccacccgccttggcctcccaaagtgctgggattacaggcgtgagccactgcgcctggcttttttttttttttttgagacagagtcttgctctgtcacccaggctggagtgctgtggcacactcttggctcactgcaacctctgcctcctgggttcaagtgattctcctgcttcagcctcccgagtagctggaattacaggcatgcgtcaccacacccggctaattttttttgtatttttagtagagatgggttttcaccatgttggccaggttggtctctaactcctgacctcaggcaatctgcctgcctcggtctcccaaagtgctgggattacaggtgtgagccaccatgactggctggattttgaggttttcattagggtttggaatgacatcaaggttttggggttcacattgtgacttggcactaaccctaatcctgatttgctatcaggggtcctgcacctccctggcctgtccctgcctgtccctacctgctcctgcacatgggtgtctccatgcagcacgacagcaggggccattccagcctccgtgggcggtagggacacattgaggctgagcacaatggggctcagcttgtcccggaagtctgcctcatcctaggacaggggcaagagtcaggccatcttgctaccatacacatcccaccttctcctggccagtaggcaccgtgtcctgaccacccccggactcacagcacccagctcagtgccccagggctagatgaacaagtccagtgggtaagttctactctcccagccctgccaatcccctgcctgggcgtactcgaaggaaggccatggtggtgtggcagatggggctgtgctttccgcccagatccaggttcagggtggtgcctgcctgttgagagcccagcagcagcacccgccggccctggcggggcttctgccggtccagctgcagctcggcatttagggctggcagggcaagcagaagagtcaggacctccctggccagcctccgggggagtccaagcccacctccctcctgcccccttcatgccactcacatagcttctgaggaatgttgtgcccagtggctccaacacacatctggatgttgaagctgcaaagacgtaagtggggctcaggggttggagcctttctgaggtcccagatcctttaaggcccatgccctctgcctcctcaccagctcacgggtgtcttggtctgaggtaggacacagctcttcacagcaggattcagtgaatcttgcaccagtagctggacagaggccttcaccactggctgagctctgatgggatagggtgatggggtaggcttgccattgtggctcctcctggcctggcctcctcttgatggcacaggaccttccccatcccgcccctggagccagtgctcacctgtacacagccacctggttggccccgtaagctcccacgatcaggtctatagacatcgaggaatgggtcagaattggcgattagggcatgggatcctcatctcatcttcccaggggttccccacaccacctcccccactggaggtttcacccagcccctctggcagtccatagtgggacaccaggccaggcatgagcccctggccgtgtctcttggcacttccagcgaatgtccaagggcctttcttgggcatttctagctggaggcagtccagggcacctgggtatccgttgtcatcgatgtctacggcacctcgaagggagaagccaaaggcagagcctgtggggaaggggctgtccaggacctgggagggacgtgacctcagcccctcactctgacccaggaacaccagcacttggccccggccactgggacccccgtagggggcagccactgcaatgtctggaaggagtaacagaaaggaagtggctgattgttattcagcctccctagatgactgtaaaactttcctgagcttctctgggaacatcccaggagactaggaaaggggtgcaaagtgtgggtgaaggaggcactgccctaccctccaggagttaacaatcaggtgggagagggacctgccaagtaggattgttataaaaacagtgacaactctcactgtctattgaggaaaatatatcctgaaaattaagcatcattattcccttttctaaatttttttttttttgagatggagtctcgctctgttgtcctggctggagtgcagtggtgcgatctcggctcactgcaacctctgcctcccccgttaaagtgattcttgtgcctcagcctcttcagtagctgggattacaggcgcctaccaccatgcccggctaatttttgtattttcagtagagacggggtttcaccacattggccaggctgatctcgaactcctgacctcaagtgatctgcccaccttgggctcccaaagtgctgggattacaggtgtgagccaccgtgcccaagccccttttaaaatttttttatttttaagacagtcttgcactgtcattcaggctgaagtgcagtggtgcaaccatggcttactgcagcctcaaccttctggactaaagcaatcctcccacctcagcttcccaagcagttgagactatagccaccatgcccagctaatttttaaaaatttttatggagacgagatctccctatgttggccaggctggtgtcaaactcctaggctccagtgatcctcctgcctcggcctcccaaagtgctgggattccaggtgtgagccaccgtgcctggccatctagcatctatttctagccttctccattccatcaaactcccagaccccccacacttccttcagcaggtgacgtaatctcttacttcaggaagagaggcagcccactgttatgctataatcccacaccaactttcttttccctttccccatttgaccctggaagaggtttccttccttcaccctgacactgggccagtcaccctcccaccccctgaggcatcacagggactctctgctggctcatccccccatttccccacaacatcattttcaacctactacatgttcttccacattgaaataatcttcccttgaccctcatctcttttctgtgatcaccttttctctttttcctcttatagtcaaacatgtttttttttttcctttctattcctcaaattcctttttaccacaaacctgttgaaagagctgtctacattagctgcatccaatttttcatctccattcataccttaccccattgcattctggcttctgaccctatcttggcctgaatcaatttatgtcactgtcaccaataacctccccttcttttttctttcttcctttctttctctatttttttttttattttgttgagatggagtcttgctctgtcacccaggctggagtgcagtagtggcgcaagctcagctcagtgcaacctccacttcccgggttcaagagattctcctgcttcaatttcccaagtagctgggattacaggtatgagccaccatgcctggcaccctcttcttgctaaagcccatgaatatttctccagccccacctaattgtatcttgcagcagcagcaggagctgcagcgcccacttcctcctgtgcatgctctttaacgcatgctcttccttgagtcccgggccatcagaccccctgggttccctcctccctctctggacactcctctgtctccttctcagacttacctcctgtaggagtcacctaaatgcttttgctccctagggctctatcctgggcctcttatttcacaggtcccgggacctcatccactttccccaaacccctgtctcccattcagatctctcttgtggaagcggggagagccactcccaactgttctttggatatttccgcctaaagcacccaagcccttcaagctcaacaggtccagagctgaactgctgatctcccgcctctccccagcacctgctgcacggcctgagttccaggcagtggaggccatcacaggcacccaactccaacctctcccctggccccacatccagtctcccaccaagtcctaataatccgagtcctaaatatctgtgaagtcactcccatctctaactccactgccaaaatccacatccaggtggtcattgtctcttgcttggattaaggcaaacacttcctaattagtcttcaactctcccatctgctctccactcagcaccccatgtgtctaagccacatacttatatgcttaaaacccatcctggttctggctgccctcaggccaactccatgctttttgagtggctgttaacccctctgcagcaagtagggctcctctcttccctcaccattgtagccatcccggtcgaggtcgcccaggggtgcgatggcagagccgaatcgcccatagagctgtgtgccagtcagcaggaggctgggggcacccagcgcgtgggggcctcgcggctgcaggaacaaatacacacgccccacttcggccagttttcggtctgcccggctctccatatacagtggagcgcccaccagcagatcatgcctcctgtgggccagatgagtggttacatgggactggaccaggggtatattggggctagggccaaatctcctcgacccttgctctcctgttcctccagtggatacgtgagactagggctaggaaagggagacagagggcagctctggtaatttgggacccaactgggtaggggtggggcatgtccctcctcacccatccccgttgacgtcagtgacagccactgaatgcccaaaatacgacgccatctgcaagatgaggagcaccatcattcacgccgctggacaagcatcctctttaagaaatgggccctcacctcccatgaaatattctgaagtctcagttccccctccacccagccacgcccactgggacctggcccccacctgctctccgcgcagccgatgcagcctctggtagtaggaatccaaaatttccacctgcacggacagcgcaggcgagagcatcattcttgtacccaaagcaacctcccactccaggtgagaaagggtggtttggtggaggcggggcgggggtggggggcgctcaggagttgtcagcctgagaactgggataaggggcttcgggaggcccagtggtgggggcacttaccgctcccagggtccagctccaagtgggggcaccgacgacatattctggcgatagggagagccaggctcagggaatgagagccttagaacctacccacttcccgctccccgttctgcacccagggaaaaatgtgtgtgcaggaagatttccctacataggggagatttcaggaaggcgctcctccccgggctgggctacccaactcccgccctaagtggatttcttgcctgtagtgttgagatccccgtcgaactcgcccacggccaccgagtaccctgaggacaagggcgcaaattagtcttttccaggggaggaagcacagaggggacggagggcaaagaaggaggagattaaggccactcagccccagccctgcattgtgcagatggaaaaacggaggccttcgaggggccaagccctgccccaggctgcgctacgagtccgcagtggaagggagcggtgggcgcatgggaggtgggcggtctgcggggaagccgcaggagcggagggcgggagcggcttaggcggtgggttggccggcaggggtggccatggaggctcccacaggggcaggacctgaccgtctgcggtgggcggtgaccctcggggtgctggaagtctggaatggcggtgttaccccagtagccgtcgaagtactctgggttgctggagtcaaaggagaggctctgggaggacacgtgccacaaaaggatgcctgggcggtaactcgagaaaatatccgcaactggagcctgggccaggagacctagggcgggagggacagcgggtgtgaagcccaaagcggtctccttgggccgcgagaagggagggaggtgtacggatgggcacgtacctaagaaataatagccgccaggagccccaagcaccagctctccggcctggaagggaagtcctgagggtgagagggggccctgtttgggagccgcccccactgcgcttttgctccctactcgcctgagtgaccacggagctgaagcccgcttcacagtaacgcttgtcccagcctgcaggagacaaggaggaggggtcagcgcaggggtgaagggaggcgcgcgcgagcccggaggagggctgggggacaggggcggggccttgagtcggcggggccctggggcgaggccagatccaaagcaagggctgcggcgctgggggcgggatccgatgggggcggggccaagccgtcgcgagtgggcggggccaggtcgtagctggcgcttactaaaatcattttccacgtaaatgcggctcagggtgttcccgcgacagggggagtactcggcgcggcggccgctctctggctgagccaaaaagcagctacctacgggcgtcttctcagcctcctcagtcttttctaggacgttccagtgctgccagggggcgcaggcctggagaaaggccacaggagtggggacgggcgcgagacttgggctcctcctggccccaggtgtccctgcccccgattgttccctgtgccctgtaccgcggggcccaccacaatgacgtcgctccagctgacgaccgacgcccccagtccttggcgggccttgaaggtttgtaaagtttgggagcctacatttcgggtctcatcacctggaaggcacaagaaggggtggggcgctgaagcccggcagtccacgtccctctgaccccaaccttgctctccttgcctgggactcacggaggtcaaagagcagcgaggggcactggccgccctcggccctccaggggcacaggaacacgccgcccgtctcctcctggctggggcccagggtccgcggggcgcccaccacgatggccactctgcataggaaagctgggtgagcgccgcgcagattccagcgtatcccaggccctggcgccggcgctgggagcactgcccggaaggccatgtggcatgggggcactggaccatctttcctcaatgacacctcacagaccaccgtgatgtacttcttcatcttatggacagtgaaaccgactctcagcgagggcaatcacgtggctaaagtaacccagtgagttgagagtagagctgggactataaccatttggtttgatttgaacaccaggggtttgagatctttgctgaaaaagacctaaactctgtacaacacctccatccttccacccgcaacaagaaccagcggttcacatgctccctggaatgcctgcctagactgttaccagatcccctcttgagagctggttttaatgagggaaggtagcgggtacctctaaagtggggctggagtgtgtgtgctgataggaggaccctagcagatctaggtttaaatcacaattctgccatatgtgaaataggaataccaatttcataaccaatgactggttttcacaaccagtcaatgctgtcaggagtaaatgtaataaatacgagtaacggttagcatggtcccagccaaatacataacaaacgctcttgaaacaatgctataattttaaaaaataattttgttgttttgagacagggtctcattctgttgcccagctggagtgcagcagcatgatcacagctcactgtagccttgatctccagggctcaagcaatcctctcccctcagccaccctagtagctgggactgcgggtgtgcaacaccatgcctggctaattaaaaaaaatttttttataggctgggcatggtggctcacacctgtaatcccagcactttgggaggccaagggattacaggcgtgagcctctgtgtctggcccataatatttttttagcctgcaggatgtttaagtagtgccaatgggatcactacttataggaggggaaatcagcaggagtgggcacaggaaggagttgagctgattcaggcccaatgacagcattcgccaacaccccacgagctttggaactagaatgacccttcaaaattgtcagagttggccgggtgtggtggctcacgcctgtaatcccagtactttgggaggccgaggcaggctgatcacctgaggtcaggagtttgagaccagcctggccaacatagtgaaaccctgtctctactaaaaatacaaaaattagccgggcatggtggcatgcacctgtaatcccagctactcgggaggctgagacaggagaatcgtttgaacccaggaggcagaggttgcagtgagccgagatcaccccattgcactccagcctgggcaacgagagcgaaactccatctcaaaaaaaaagaagaaaaaaagtctgggcatggtggctgaagcctgtaatcccagcactttgggaggccaaggcgggtggatcacctgaagttgggagttcgagaccaccctgaccaacatggagaaacctcgtctctactaaaaatacaaaattagccgggtgtggtggcacatgcctgtaatcccagctacgcgggaggctgtggcaggagaatcgcttgaacccgggaggcagaagttgcggtgagccagtgattgtgccattgcactccagcctgggcaacaagagcgaaaccccatctcaaaaaaaaaaaaaaaaaaaaaaaaaaaagaagaagaagaaaaaaagaattgtcagagttgatgaaagagggctggacccttatcaaatgcctcccccacacctgcctccactctccccactcacccacttctcattgatcagacactggatgtgggccatcttgggaggggacttggagtgaactggctctcttcagcagaggaaatcccctaagtggctgacacttgaaggctatctgccattgccacccattgccactccctgaagctggtgggcacagtgtctctcacaatagtagctcagggtacacgctatgaagaggaggagccaagactctaatcttggcactcttgattctgaagcctgatcaatactaatcattaatgacctattgcttcttttcaaatatttataatgttgatggagatgagggaaatggaacagaaatgcaaggtgcgggagggtagacaactttagttctgcaaatcaatttaggacatgtgctcctctccacatttcctttcttttttttttttttttttttttgagacagagtttcgctctcgttgcccaggctggagtgcaatggcatgatctcggctcaccacaacctctgcctctcaggttcaaacgattctcctgcctcagcctcccgagtagctgggattacaagcatgcggcaccacgcccggctaatttttttttttttgagacggagtgtcactctgtcacccaggctggagtgcagtggcatgatctcagctcactgcaacctccacctcccgggttcaagtgattctcctacctcagcctcccgagtagctgggactacaggagtgtgccaccacgctcagctaatttttgtatttttaatagagacagggtttcaccatattggccaggctggtcttgaactcctgacctcatgatctgcccacctctgcctcccaaagtgctgggattgcaggtgtgagccactgtgcctggtctcttttttttttttttttttgtatttttagtagagacggggtttctccatgttggtcaggctggtctcgaattctcgacctcaggtgatctgcccgcctcggcctcccaaagtgctgggattacaggcatgagccaccgcgcccggcctcctctctgcatttcaaggtgttgagggtggagtggttcatacaactgacccttggggaaaaaataaagcatcaactcttgtcttccctttgttcttgctgtagttttcagtgcccatcagcccacatgtgccctgcccttataccttcacctgagccagtcccctggaccccaacattcttgacaagaaatcaacctgaataggccccacaagtcaccttgctcaactgctatcgcaaatgggaaactcgaagcccccagaagcagtgatggggaggggtcctgctctctcccaataccccaacttcccttacggctcacctcccatggctgtccttgtggaagtccagtgaaaatccaaactggctgccattggggcctgcatagaaggtgagctgcactgggtccaggttcaaggcccaggctggaggggcagcacaaggtcccaagagcagcagcacccactccagaagccagagggcttgcagtggacacaaagctctggccatcttccttcttccacaacctcccaggcaggaatgggccagctcctcctccttcccttcagattcctccacaggaagtcttttcttatcaaactggaaccccaagtaacttgctgagcaacgggcagagcaaagggctatagcccctggactcatggtggctagaattgccaggaagtgggtgaggccacccagagggtggatgctcatggctgaaagccatgactcctcccctttcctgagaatagtttattaccatgtcctattggttctgcctatcaatgatgtctcttgaatctttaccccatctctactaccaccgtgctagtccaagccaccatcactttctgcttgggatagcgtgattgtgaactggtccatacttgtctactctagcctacagttctaatctcctcccttcccccatctggctgtacagctgtggtgctttgtgacttggccacaggtcggggaaggagaaggaagctgctgcccccgataaaacctgaggcttctgtatctttttggatatggcatttacccacttcctccttctaggaccttgggcggcctcaaccagccatattggtgcagcagcttcctcactcctcctccgtcttgagccaagctttagtgtggccacagcagtgcagtcagtgctggggacagggtggtgaatggaccttggtctaggtggcaaggagattggggataaagtggagttattccagggaattttgactcacagtttctgagattatgcattagctgttcagttgaaggtaggccctcaatcctttttgggtgatggagctctttaaccattaagacttgattctggttgggggctttgcctaggggagccttccctgactcctcaggctggccgcgtgggctaacacacgtaggcacagcattgagcacactgtttactcttggtccgttcacaggattgtgtaaatgagtcccttgggagcaaggctccttgctacagccctagagactacccaagagtccaatgtgtagtacgtgtattgctgaaagactggatggaaacacacactaaggatggaagatgcaaacatagggtgacaaagtgaagggatgagttttgagcagaaaggcaaagtcattttctctcggtaagcggaagaggaggagtgccaagtcttactggcactcatgccttcccaaaaaagcaggttctcaggaagatttaagaggtccgctaggggtaaccatagccacattttccttttgatttctattttctgatcaaacttaaccattgccgtatcctgctcaaccaccctgtaccattttgaagtcccctcgtaatttactacctcagcctagagttaagaatcttatcctttataggacaggaagctaaaagcctgaactttggtctgggccttcttcattgctgagttcccagtgtcaagtacatgggaggcgtgtaattaatgtatttgcttgaacgaatacttaacccagtcctctacttaccttctatcctcccactgtcctcaggtgagtgattgctgtattactggtgtattctgtgaggccaaatatgaacttacatttcactcaagttttcaataagtatttactctgttcaaggcactgtgttgataaaggatacaaagataaccattaggccaggtatagtggctcatgcctgtaatcccagcactttgggaggctgaggcaggaggatggcttgagctcaggcatttaagaccagcctaggcaatacagtgagacctcgtctctattttaaaattataaaaaataaaatattttaaaaactccaaagatagccatcaaggagacttaacaaacagcccagaaagagttaagacatgaacacacataactgcagcagagagacagtcaagcatgccttgaaaaatacacagattatcaaagtcgtatatcattgttactcataacaaccctaggaaataagtactattatgcccattttataaacacaaaactgtggcacaagagttttaggtaaattgcccatgtttacgcagccaacagatggcaaaactaagattcaaacatgggttgcacttgaactcatgttcaagttgccttttgtcagagaatgaaagggtttttaggcatagagaatacatgagagcagcaaaggaacacagaggtagggaaggacaagtagttgactcagcatagcagaatgcttaaagggttggactgaggcgcaagggggtaaagcttggggattcaaattactggaggtccttgaatgccatattaaggaatctgaactttaatccatgggggatggaaaatcataaagattttagccgggcatggtggctcatgcctgtaatcccagcactttgggaggcccaggcgagtggaccacaaggtcaggagtttgagaccagcctggccaacctagtgaaaccccgtctctactaaaaatacaaaaattagctgggcgtggtggtgtgtgtctgtaatcccagctacttgggaggctgaggcaaaagaattgcttgaacctgtgaggcggaggtggcagtgagctaagatcatgccactgcactccagcctgggcgacagagtgagactccatcaaaaaagaaaaaaagaaagaaagaaaagaaaaataaaattataaagattttttacaccaggtttggtggctcatgcctgtaaccctagcactttgggaggccaagatgaggattgcttgaagccaggtgtttgggaccagcctgggcaacatagtgagaccctgtctctacaaaaaaattaaaattagccaggcacggtagtgcacacctgtagttccagctactgaggaggccgaggcaggagaatcacttgagcccacgagttttaggttacagtgcactacgattttgccactccactccagcctgggcaagagtaagactatgcctaaaaaacaattttttttttttttttttttttttttgctgggcatggtggctcacacctgtaatctcccaacactttgggaggccaaggtgggcggatcgcttgaggccaggagtttgagatcagcctggccaacatggcaaaaccctgtctctactaaaaatacaaaaattagccgggtgtggtggtgcacacctataatctcagctgcttgggaggctgaggaagaattgcttgaacctgggagacggaggttgcggtcagccgagatcgtgccatcacactccagcctgggcaacaagagcaaaattccatctcaaaaaacccaaaaaaccaaaaaccaaaaaacacatttttgaattttttttggctcaattctgatgcacaatcctcagttaatgatattttacttggctcatattctttttatttttgagacaggatcttgctctgtcacccaggctgtagtacagtgacctgaacatggctcactacagacttgacccctgggctcaagcagtcctcccacatcagcttcatgaatagctgggaccacaggcttgtgccaccatgcccagctaatttttaaattgttttgtagagatggggtcttgctatgttacccaggttggcctcgaatttctgagctcaagagatcctcctgccttggcctcccaaagtactgggattataggcatgagacactgtgcctggccactttgctcatattcttgaacatataatcaaaatgtttactatgtattcagtgtgagatacgttgggggctgcggtggggggatataagaatcactccctgttctctcagagattacaattttactgggaagcaatgaatacaaaatgagctgcattcagattctgaaaagccagtaagcttacacagaacaggaaattaggttctagtcaggaaggccacccaggaaaatgctgcaaaaattgagatatgagttggtagaagtgagtgaagctgtctttggcaaataagaatggaaatggctgacgaggcctgaattagtcatcaagggtttgaagagggagtactttcatgtttcaggccaaggtggctgaggccttatcagaacaaggcaattaactgcacgtatcttcacataacactctatacagtccagtctgcctctttgacttgtcacctcccctgctctcagaaaatcactttttttttgtttttgagatggcgtctcactctgtcacccaggctggaatgcagtggcatgatcttggctcactggaacctctgcctcccgggttcaagtgattctcctgtctcagcctcttgaatagctgggattataggcgcacgccatcatgcctggctaatttttgtatttttagtaaagacggggcttcaccatgttagtcaggctggtctcgatctctcctgacctcgtgattcgcctacctcggcctcagtgctgggattacaggcttgagccaccgtgccccgcccatttttttttttttttttttttttttgagacggagtctcactctatcactcaggctggagtgcagtggcatgatcttggctcactgcaacctccacttcccacgttcaagcgattctcctacctcagcctcttgagtagctgcaattacaggcatgcaccaccatgcctggccaattttttttttttttttaaatttttagtagagatggggtttcaccatgttggccaggctgatctcaaactcctgacctcaagtgatccacctgccttggccttccaaagtgctgggattagacatgagccaccacacctggcctcacttttcattttctaacgtgtgtgtgtgtgtgtgtgtgtgagacagacagggtctcacgctgttgcccaggctagagtgcagtggtgtgatcttggctcacggcaacctcccggttcaagcgattctcctgcctcagcctctcgagtaactgggattacaggcgtgtgccactacgcccggctaatttttgtaggtctaatgtcatttctttctgggtaaggatctttgctattttaggaatataggcagatctgagtactcaaccccaggttcaagttgaacagctcctctttaatcaaagggagaacacagatgtatcaaacagagtaggaaagaaatgtatcaaaagacagtaggaaagaaagcctttccttcttgaaaggctgaggttgagagggaaagctaatttatcactacaactctatggtagctttccatgctaaattttccctgcctcttttgtgattttttgatatggaagagtaggggttatatcttctctgtaacaattaggccatatttccttataccaagtagaggtgctcaaacactgtagtggtattaaagggctgaggagagtaactgaagactggcatacagaactccacctggaggacaaaagtccggcagatgattcttgtcatctcagtgcccttaaagtagtccaaaatcctaaaattcaaagccagaaattccacacccatttagtaagcacctatatatacaccatatattctactacacacagattatatatctaaaatggaaggaaatctttcctcttgtgggaaagaggaagtggaaaggaggtgtacatcccaatacatctacctacaactgagagaaattaactactattaccacctcccacaccatcatctttcctctctctttgcgtagcctgagctttcagaagcacaactgcaaacatctctaactggttcacaggaatctattccttggtcatgtcaaacaagatgttatttataacccacacctccaaccctacctaactttgagtggatggggcaacaattacgacagactctgctaagtttccacaaatcattggtttattagaaagttcctttccctcattttacagcatatatatctctatcatatgtgataaagttaaatacaatctgttatgcttgtaagtaaggtttatttttatttttacttttaaaatcactattctggaagttaaagaaaatgcccctaggaaggcaaagaggcagccagagtatggctcaatctacaagctaatgggaagcagcacgaaaatgttaatactgtattatttatttacatgggctgaaagcaaagaaaaatgagtcccttcacttacacagatgatttcatttttccagtgctagttatccaagaagtgatgcttctgaatcagatgagtactgaacaggtaggagggtgggagggcagtcaagagttgtgtttgcctgccactttcttttcataaactttactcttttgagaatttgcgaaggcaggaacagagccttggcccaggtaagtatggtttttcttgtcaagtgaccaaccaaccaattctagccacacgaatagttaggaaaatgccaaagtgggaattgttaacctcatcaaaggagatgggacctgcaacacaagcacctttgggtcagtgtgttaattagggctgagagcctgggtgaaaggcaagaagaggggcaaaagaggctgaggtggtaattcctcttgtcagtgtcatgggagaaaagaaacaaggaacgtttactgtctaaactgagctgggcagagggcatggaaactatgaagcaaaatatctgtaaatgtgctcacctcccaacaaaaggaagactgtcccaactcatcctccagcctacttctacttccgtttctaccaacccaaaaggcacattaaaaaaaaaattgtcagagggggctaagtactaggaaggcaaatggactgactgcctggaacaaggtacccagggaaacccaggaatccccccagacaatcaccaaatctcactgcttccagacaataaagctgttgaatcccctccttctcctctgtggggtctacctgtttctctgtgtaaaacagcaaaagtacatgagggagactgttaaagatgagcatccctcagaagcccccagctgactgctgcccattagctcaaaaatcccaatactgggggcactacatactgcaaattacttaacattttgtcccagcaaaaaatgttttaacattttatagttcataacttcaaaaaatacataagtttggtaaaatatacatgcttagtcagttttgcatctagcagaaaacaaatattttattttttgttttcattttataacctttagagtttcttaattcaactagggcaaacatatttacacaaagccaccagaacgaggatcacttaaagagctggatgtaaaaaatattattgcagtatactacaaatatggaaccttttttatatgagctacaaaaagcagcatttacgtttatagagttcagtgcaattttttacattaaaaaaatcctataaattaagaaggaaacatcaacacaacagaagaaaatatacccttcactttagacacatgagctcctctctgggccatacagcttttattcatgataggatcttcttttctgggatatggagatgcctcttctgggatgagggataccaagataacagtgccaaatgtgtggctccgttgatgtgggaactggatggaattgcagcctgagttatatcaggttccaggtgagacgctttccacctcacctgggataacgtaacgtcaccaaagatggtcaaagatactaccccaaaatggtggcacttccaccactagaacagcttggccttccctgtggcgctgagaaggcaagaccagatgggcccacagcaagtgctctggtgacaacccactggccagaggggaggaaaatgttttaaaatttacagaagggaagagcagaggaaaaaagcagagggaggaggggattatctaaacttgacagtttggagatgttgctgcagaggggtgggtagcacttactggtgttccctagcttagaaacacagaagagggagggacaaattgagaggaggacaggaaaaagaaatccctgatagtaaactgaaagcaaacttcaaatctaaacccacccctgcaagccaaaactcaattctttggctgtcagacactgcccatcccagcttctacttgctggtattaatggctcaacacccccaagggaacatttatgggtctcctcccctggccctacctaggatcccatcccccaactcacgtgccatggctggggggatgttgcaggtcctgacctgagaagatggggtgaagtagtgggtgaaggtgaagtgcagtggcagctgctgcagcaggccgtggagcaagtagggtggggtagagggcagcatgtgggacagggtgaaaggtgaagggcccaggatggatggctgaggcgggaatgatgtggatgggatggctagcgagaaaggtggcagggtggccagggatgattgagtgagtgaggtgggacaaagaaatgggggtcagatggggctggggaatatgatgcacctgggcaagtggttggggatgggggtgagggtgaatgccgatggcggcagcagctgcggcagcatgatgttgtaggatggcatgctgaacagttgtgatggaggtggcagaggctgtagctggctgctgaatgtggatgggttgcagggctggtgtggctggggccagggcagctgaggctggaaaggcctttacttgcttggccagaagctgctgctggatgtgttgctgagcagcctgctggagcttgctgtacttctccatctcctcaggggtgaaggtgatgggctggctttccaggggggccagtgaagcatcctcagccccatctgttgactcaatactaggatccccactgggaggtgcataactggggaaatgctcaaggtctggtgctataggcagcaagctggactccacagggcctggctgactgctgctatccagggactccagggtgtccccatcactggggtcggggaggtagttatgggagatggttgggtccccagggtagcagtcagaatgtgctggggtgcctagtggagccacagggtgatcagcagtagcttctccagactttgactcttctgggggtgggtctaataaggggccagttgtttcctctgaagggaactgatgcccaaatagggcatcactactccctgggggcccctcttctgtctctgactgttcttgctcttcccccctttccaagccagactcttcacacttcttattgggctttcgggtagctgggagcttccctatcagtggaaggacaggcttattgccaagagatggggggagcttgggcccaaagtaaccttgtggggggtccttgagcttgggcccagctttattaggggtggcctgcacctcctcactcacactaggtttcctctccactttccttgactggatcttctccagtagcagtttggcagtgacagagttcttgtcttcaggactgcagtcaccttctgaccctcttcctgtgccaatgttgctgttctgggaaggtggacctgttgctttactgtcatctcctctgccatcatctttcttcccaggaccttctccccggcctgatcggaaatagtggggggactgggagcggtagatcttagaacgaatgaagtcccgacgcccagaatgcctctcctcagggctctcgtgaccccatgatctcttcctggagcctgatctctgggaagggctcctggtgctgcggctgcggtcccggctatagctccggctccgttgccagctgtgggctgtggtgctacggcttctccgcttgcttcgactacgactacaactgctgctgcggctgcggccccgggatcttgagcgctctctggtatgactccgagatcggcttcgggactggctgcaactgaggctatagtcatcatcagaagatgaatatttgtgccgttttgatcggtgtttggagctggcatagtctgagtcatctgagtcatgggagcgcttggagtgccttcgtgatctgtcactgtagtcactgtagctgtcatcagagtaactgcgctgtctactatagcagctctggtctgaagaggcatctgagctacttgagtaagaacgccgggaggaacgatgcgaggaatggcgccggccagaccttgagcggctgcgggaatgctcactgcctgaatcttcctcttcttcttcctcactgtactgggatggagacttctggtgcagccggtgtgaggaagcatcatcactatcctcatctccactactgggttggctccgatggctagaccggctgctccgtttggtgcctgctcttcgctggcaggatgaaggtggaagttcacctttgtgtttcctcccaccatggtcttgggagctgctaccacccccaccttcatcctttttgccactgctcccctcttcagctgggagggatctccgctgggagtcatcttgagctctccgccttcttcttggtggtgcgggactgccactcccagggggttctggtttgggtcctcgttcagaatctgctggggctgatgacttattcttctttcgttttcgtttcttgcgcttcttagatttctcccctgactctgccttagagcttttctcttctgtgtcagccttgtgtttacgtttgtgtttgctggattttttgtgcttctttttctttttgtgccggtgggacttcccagatcgttctttcttgctgggaaggcttctccctgtgtcttctgtctcagacccatggctacccccaggctcctgcttgttcaggccgctacaggcagaccctgaagcaggtgcgtccattctgcctcctgaggaacgtactattttctctccgcccacttccttgcttttatttggctcaccaggatctaggccttggagatggtcctttgaggagcttcctatatcctttggtttttctgttcctttagttctggcatctttgttccttgaaagtttaaagtcaaaatataaagggttacaactgtatgaaatggagggttctgccttggtgaaaattaatagttctgatggccactggagggcagtgctttcatctttgctcaaaactgggaagaagggaccagtaggatgtttgggtccttcttggctttctttccctgctggggtggccagagaggtttctttagaagagttggactcacacatttgggtctctgaaaccttctgactatgactttctaaactctgatcacttacatcccctcctaaggccttctttgcctcagctttgcttcctggttctgagggctcggtcatgctggtttccttcggctgctcagagacttcactaactgtcttttctgctccttggcttgctgccgccttgatgcagcttttaggcttgggagaactgccttttttactctctggggcattctttgggtgtgtagtattatcaccatccatttgttcactggctctcataaaaagtagaaagggaaaattaggttttactttgcagtgtgctggggggatgtagtggtaatactcaggctctgtagccccagctccttcttctcgtttcatcctttttaatttggataatgttgaggcaagggaccctccatcctgagggtcttcatcctcttttttaccatcaagattactgctcccatcagagtctcctaccttctgcagtccttggtcagaactcttctcatcgggttttgttccatcttcagaggtcccttcctccgcatggtccttgaaaactgatgctattgattcgagtttgacaggagcctttttggcaaaagaaaatgacactcccaatttttgcaatggggtccccagattattcttaatgccaaagctgatgccttgggaggctaacccaggagcctgggccagtccagtggtattagtgatttgtactgcagtgaaagggcctcctttatctgtggagaattcagatcccaggccacaagaagcagtggcacctgtgccactatttgtagctgattcatctttatcatcttctccaccttcttcatctacagccactgtggttggtttgaacatgggaccacttccaggtgcactacatgatgatttagaaaaataaaaaacaaaaagcaggtttaggagtacatttcataaaccttataaaatactaatctcttatatcctatcattcattataggtaggtctcaaagacagtgagtggtggtcatattccctagccctatactaacaaatgcgactttctaagaggaggttaggcaaagactcattctgttaacctaccaaattcccagggccagccagttattacatagcttttccttaagctgtctaaagtacaaaaagctgggtgtggtggctcatgcctgtaatcccagcactttgagaggccaaggtggacagactgcttgaggtcagaagttcgtaaacagcctggccaacacggtgaaaccctgtctctactaaaaatacaaaaattagccaggcatggtggcacacacctgtaatcccagctacttgggaggctgaggcagaagaatcgctctaacctgggagatggaggttgcagtgagccaagatcacgccactgcactccagtctgggtgacagagcgagactccctctcaaaaaaattaaaaaaaaaaataaaaaataaagtacaggccgggcgcagtggctcacgcctgtaatcccagcactttgggaggtggaggcgagcagatcatgagatcaggagttcaagaccagcctgaccaacatggtgaaaccccgcctctgctaaaaatacaaaaattagctggctgtggtggcgggcgtctgtaatcccagctactcaggaggctgaggcagaagaataacttgaacctgggagaggcagaggttgcagtgagctgagatcgcagcaccactgcactccagcctgggtgacagagcaagactctgtctcaaaaaaaaaaaaaaaaaaaaaaaagtaagacttatgtcacgactgaaatagcccatcattactatgtttctgatctcatttcttattttataattttgtccatcagtatgttatctaatgtatggctgtacatgtattcacataggttttatttcattcaattaaagaaaaactcttgctgggtcagggtggctcacatgtgtaatctcagtgattcagaaggctgaggagggaggattgctcgaggccaggagatcaagaccagtctgggcaacatagtgagaccccacctctaaaaaaaataaaaataaaaatttccccatgctttcaaatttcattttttaaaaatttgcatattctgagttaaacatagaaacttccactgtgctacttatggcagtctgtggtcagcatgtctgccacagaaactaaaaagtccatgcctatctcctgggtaccgtaacaagcatttgctttggttttgtggcagtttctgggcattcagtactacagtcataatgttacctgagcactttcatctttgacaaaaggaacatcaaggagcctcaatagttttaaactgatgatcttgcctgaaagttttatttttctgaggtggggtctaactgcattgcccaggctggagtgaagtggcatgatcatagctcattgcagtctcaaactcctggctcaatcctcccacctcagcctcctaagtagctatgactacaggtgcacctcaccatgctggctaattttatttatttatttgagacagtgtcaccctattgcccaggctggagtacagtggtgcgatctcggctcactgcaacctctacctcccgggttcaagtgattctcctccctcagcctcccaagtagctgggactacaggcatgtaccaccatgcccagctaatttttgtatttttagtagagatgggcttcaccatgttggccaggatggtcttgatctcttggcctcgtgatccacctgcctcggcctcccaaagtgctgggattacaggcttgagccaccatgctcggcccatgctggctaattaaaaaaaaattttgcagagacagagtcttgctatgttgaccagtttggtcttgaacacctggcctcaagtgatcctcctgcctctgtgtcacaaagtgctgggattacagatgtgagccactgcgcatctggcttgcaatttttatagtttgtacactatacagcgtacactatacccttaaattccaaatcaagaactaaacagaatcagagacctatttatatgatgtccttgttatccaaaccctagctaacagctttcctcaactcagggataagtatattcagacaatatgtaatctctcttttttttttttttctcccaagctggagttttgctcttgttgccccggctggagtgcaatggtacaatcttggctcactgcaacctctgcctcctgggttcaggcaattctcctgcctcagcctccttagtagctgggattacaggcgtacgccaccatgcccggctaatttttgtatttttagtagagacagagtttcaccatgttggtcaggctggtctcaagctcctgacctaaggtgatccacctaccccggcctcccaaagtgctgggattacaggcgtgagccaccgtgcccggccaatgtgtaatctcttgctatctaaactattgctactggaaaatgagaactcaacagatttggagagcaagaaatacttacactgtgttatgaaacctactccacagcaaacaaataaaaaacaacgccccgcaaactgaataaaaaggggattcttttttttgagacagggtcttgctctatcacccaggctggagtgcagtgctgtgatcacagctcactgcagccttgatctcccaggctcaagtgattcttctacctcaggctcctgagtagctgggactacaggcatgtgccaccatgcccggctaatttttaagattttttttttttagagacagggtcttcctatgttgccctggctggtcttgagctcctgggttcaagtgatcctcttactttggcctcccaaggtgctgggattacaggtgcgagtcactatgcccagcatatgctttttaatataaatgttagaaaatgggaatcattgtaatagtgtcataatttattgatttattgagaatctttgatgtgctaggcatcccttcaagcatttctgaggtaataatcactcctcacaacaactgtaagttgttcttatctctatcttacagataaggaaactgaggcatagagagtttagatataatttcattaagtcacataaatagtaagaaaaatatggcctcaaaaatacacaaacttaatcagtatattatactataattatatagatatgcttttagtttgaaagaaggatctattaaacattttaaggaactggaggactaattattatgttaagtaaagtaacccaggaacagaaaatcaaacactgcaggttgccactcatatgtggaagcttaaaaaaaaaagttgatctcatagaagtaaaaagtagaacagaggatactagaagctgggaagggcggaaggagagatttgttacaaaattacagctaactaggaagagtaagttccagtgttctgtaccactgtaggataactagagttaacaatactatatagtttcaaatagttagaaagaggataccgaatgttcctgcacaaagaaataataaatgtttgagatgatggatatggtaattaccctgatctgatcgctatatattatatgtattgaaacattactaggtaacctatgaatatgtacagttgttatctgtcaattaataaaaactgaaggtttataattcttttttttttttttttgagacggagtttcactcttgttgcccaggatggagtgtaatggcgcaatcttggctcaccacaacctccgcctcccaggttcaagcgattctcctgcctcagcctccctagtagctgggattataggcatgtgccaccacgcccggctaattttgtatttttagtatagacggggtttctccatgttggtcaggctggtctcgaactcccaacctcaggtgatctgcccgcctcggcctcccaaagtgctgggattataggcgtgaaccaccatgcccggccacttttgttttttttgagacagagtcttgctctgtcgcccaggctggagtacagtggtgcgatcttggctcactgcaagctctgcctctcaggttcacgccattctcctgcctcagcctccagagtagctgggactacaggcgctcgccaccatgcccggctaattttttgtatttttagtagagatggggtttcaccgtattagccaggatggtctcaatctcctgacctcgtgatccgcccgcctcggtctctcaaagtgctgggattataggggtgagccactgcgcctggcacaaggtttttaattcttaaatcttaatttaaatcttaaattataatctgaaatctataatttaaaattttaaggattataattatctgtacaaccctctgataaaaaatatcctcaccattcagcttgttttctttgctctgccaactcatggagccgccgaagggctttttcctgttttttctcatccttgcgggatcttgaagagacatttcgagcaaactctctctgcttcagatcttttaatctctgggttaaaagaaagaaagatacagagggtggatgatttacagtaacttgggaatcagaaagcaaagcctttaggacatgaccctcaaccaacagtcatggtattagtgttgaacacattatcatattctcttatggcaattgaaaacacaatggctgattactttgggtatagcacttgcagtatctgcatttctaattaggacagcatatcatttgctttattaggcaaaataaaatgatctcaaatgcaacaagcaaattttagaacactgggaggaaagaaagggactatttaatcacctgctcctccaggatgcaaaactagacaaacataacatgagataaattgtaataacacaagccaaagagaacagaaaggggttaggctagtacagaaaattacccaggtgtaagatcttgaaaagcaatgtacagcttacatggggggggggggttatttaaattagaacaaatagaaagcatacttttatttcaccataaaaaggtggtttttttttctttcagcatgagtagaggtttcctataactattaaataaacccaagacaggtcttccagcgctagcatgtttagagctcaccagtctgaccacttttatctggtcagcctgctgaaagtagtatgtgaggctttgcattccttcatggccctgagaggaatatccaggggatgaggagggagagcagagataagtcaaagattttattacttaaaatccaggtaacagaatgggtcttttattttcagaagctactgtataattttccttaaaataaaacaaaacaaactacaaccaaaaaagaacagtgttatgacacactggtgacagaacccagacatatctatctgcaatgaagacagaactaaaattattttcaagacattagataataacaagaaacaaacaaaacgaaacatatacattaacctatgcttttacaacagcattgggaaaaggaatttgacccagtataaagtggacattgctttgtagaaaggcatgatgttcaacagacagaggaattttcttacctaatatttatgaaatgtgttttgaatctttttaaattgggaggggggaagggtaaaaagacacacacaaaaaaagatatacagctaaagacactagtagaaaaactcactcttgtgatctgggctcccaaattagaaggatttgctttcaatacatcagctgaaaatgtcacatcacaaagaaaaaaaagtaaaaaataaaacaagagtggaagagaaaaaaaaaataaagcaagcattactacacgagctctcttagtgaatctgtaaactattatactgaacaatcagggacaaagccatcaactctaaaagggctagggagaagggaagcacctgtacaacatatatatgtgtacatacacacagactgacacagtaatcccacctagaaaaatggaactacctgtatttcttccagaaaaatggttccagaactttggaaaagaccattatggtattaaaaagcagtcctgtttccattagcccttattatgggggaagttcaagtaatgaacagctggcaaaactgttagtgcccataattaagatttttttttttttttttgagatggagtctcactctgttgcccaggctggagtgcagtggcacaatcttggctcactgcagcctccgcctcccaggtttaagagattctcatgcgttagcctcccaagtagctgggattacaggcgtgaacccctatgcttggctaatttttatatttttagtagagacgaggtttcaccatgttggccagggtggtctcaaactcctggtctcaagtgatctacctgcctcggcctcccaaagtgctgggattaaaggcatgagataccacacccagcccacaattaagatttttataaaaccacttcaagatgaaggatcaactattttaaataaatacgaattctaatttcttcctcctgaggggaatggggcagaaagaaaaggcttatcaggcctattatatgattacttttggccacaaacctagttttttcttccccaaacacgtaacaggctctctaaccaagatttagatagaatataatgttcttctcacatctgccattttctcttttttttttgagatggagttttattctgtcgcccaggctggagtgcagtggtgtgtgatcttggctcactgcaacctctgcctcccgggtccaagcaattctcctgccttagcctcccgagtagctgggactacaggtgcctgtcaccacacccggctgattttttatatttttagtagagatgaagtttcattttcttggccaggctagtcttcaattcctgacctcaggtgatccgcccgcctcggcttcccaaagtgatgggattacaggcataagccactgtgtccatatacattatggcctgccatcttctctctagccacctgctaagactggaaaatttccccatgccatttcctcccctcttacaaatatttcactacttttaggaagcatttttcaaactacatgacattgtccaaaagaacaatcattttatcaaagtatggagtccccagggtgagtcaagattaggctttccattcagcagccactctgtacaaccttgaagatgaaggaacaggaccatgcccacatcatgctgaagacatcctatctcaagttcctaccacaggaatatggttggaggtagatacggaagaagatgggatgaagcaataaaacgaatctaaattgcaggctccctctgggcaaacctatcctaagaataccctataaggcttaggaaggctcccagtatcacatttacaaactttacagtcaagtctgcaatctcaaaagcagaattgagaaccccagaattctcaccccaaccttgagacaggactcagcaaaccatctcaaactgagtatgtatacttgtggtttctctcagatgaggacattctggcgacttttttttaagagacaaggtctcactttgttgcccaggtgggagtgctggggctattcacatgtgtgattccactactgatcagcatgggagttctgacctgctctgtttccgacctgaaccagttcacttctccttaggaaacttggttggcccccagctcctgggagttcatcacatgatgcctaacttagtgcagacacccaatcagcatagcgcactatagttcagaactcctgggctcaagtgatacccccagcctcagcctcccaagaagccaggactacaggcatgcaccactacgcccagccaagacatgggttataaggttcatattttcctttacctagaatgaatgcctaactccaagtgtctcctgcctactcaaggtcagactaaattcttacaaagtctccactgatccttcaaaagaggtgactgttctttctgaactgtccctagtggtgctttgtcatactgctcacctagcagctatcgtactttgttctctgaccagttattcctgtcttttaaaaaggcagtatgtgtaaagcatcggagtcagaaagcttgggttcaaatccattaattactagccaatccacttattactaggtgatttcacctctctgagttccagctccctcattaaaaaacagggctatctatctacagattaacaagattaaatgtcaaaataaatgtaaagcatttaataagtcacaactgttcaatactcccttccctccgtgtggggcagggactacagcttatctttataatcaaccccgcagtgcacaaaacactactaagtctacggagggcatctggtaaatgtccagtgaataattcagttcaaacatcagatccttcatttttcctcaaataattttttctactatttgtaggaaaggttgatataaagtattctcgtatctttattagggacatattaaagttatatagtatggtcctcctagttaccactccagatacctcttatttctagacagaattgggccaaatggcaaaagatactggccagaaacttctcagcttcctacctaaaaagtaatttttataaaggcacaaggacctaatcagagtcaggttttccaaaattgcctattttattccaaaaggctaccaacgtctggctcatttgtcacggaatacccacgtgaaattctgtgaattgtacctgcacttttctcttaaattctaaagaggaacacaactatagataatttcttcaggtgagaatagagaaacatgcctgcctatgagagaagagacagcgctcacaagaccaaacactgcagatatgtcatcaatctcttgtcaaagtctgagcaaattccataccatacacaaaaattcaagttaaactccaaaatgggacattctaatttgaatggatttaattatccatttaagctgactcaaaagctatgagatgtccttatctctgaaaattatacgatatgctttctgaagagctgctaataaattagattatgttattgaaccactaatggtattaacaaaaatttaagccacatagcacatttttagttgggaaataccttaattcaagaaaaggagactgaaccccactggaaatgaaaagatatgaagattctgttttcctgaaaaatcaacagcatttttccaaaacagtatacatttgtggcacagtacagaatggaaggaacatttcccacagatccttaatcacatggtggctgggatttccattacaccttccagaagaccagtagaaaggcaagaccctaacaaatgatccagtacttgaagtacccatccacattaactgtggctctttgggttaaagaccactctaaatggaaatgatattccagttcttaaaacataacttaaacagcattatattggcagaaaaacgttttactgtggacacaaagtattgctctactatcactgaaaagattaagccaaagaaatgagaatcaggtaaatctgaatgtggattataaatgtgcagaaaaggtacaccccaacagccacccacttctctttaagtgtagacttcaagagcagaaacattctgctcagtgtctattaaaataaggcaactatgacaattgggctttgcagatcatctgtaaaatggctcccaagaaatacggcctctttctatagtggttagaacttttaagatagtcatcattctgtcaatagtcaagagcaacagtgttcctgctcaactgtgattgagttgagtaagacacacatttctgcacagtgttctctaacaacaaaagataatacaagggtttaacaaaatctttttgtatcttttagtgctatgcttctctctaccatcaaaataaaatttgacactaggagtttatatttgatggagtatactaagaataattctgattactttctcgagtatttaaaattgattatctacatttaaataaaacccatttttctcatgtaaaggggatttcaagtatcagaaaacaggcagaatttagggcagaatatttcctactgccactaaaatcccatgttctacatttactcagctctgaagagaaaacttgattttgtccctttagggtctaaagattatccatggcgtctttccctcaccagatagcaactctgctctcccaacagggactgaggcttagtctttctttgtaactaactatgcaatgtacacatagttgtctatgacacaaaagagatgcgcagtaaatatttatcaaactgggttgtggctcacacctgtactctcaacactttgggaggctgaggtaaaaggatcgcttgaggacaggagtccaagaccagtctgggcaacacagcaagactgtgtctataaaaaaaaaattgagatggagtttcactcttgttgcccaggctggagtacaatggcgcaatctcagctcaccgcaacctctgcctcccaggttcaagggattctcctgcttcagcctcccgagtagctgggattacaagcatgcgccaccacgcctggctaatttttgtatttttagtagagacagggtttctccatgttggtcgggatggtctcaaactcctgacctcaggtgatctgcccaccttggcctcccaaaatgccgggattacaggcatgaaccaccacgcacggccaaaaaaatttttttaaattagttgggcgcagtggttatgtgcttgtaatcccagctatatgggaggctgaggcaggaggattgcttgagttcaaggtcacagtgagctatgattgtgccactgcactccagcctgggaaacagagcaagaacctttcattttattttttatttcatttttttgagacagagtctccctctgtcacccaggctggagtgcagtggcagaattttggctcaccacaacctccacctcctgagttcaagtgattctcgggcctcaacctcccgagtagctgggactacagacgcatgccaccacacccggctatttatatttttagtagagacagggtttcaccatgttggccaggctggtcttgaactcctgacctcaggtgatccacctgcctctgcctcccaaagtgctgggattacaggtgtgagccaccacacccagctgaacctgtctttaaaacaaaataaaaaaagatgtgttgtatctcgaccactatttctggctaagcataatctggccttcttcaaatctcaaccactccttttcctcttatgtcaatgatcctgcataccaaaatcacagcctcttctctccactgttttttttccccctccctctacaacaaaacattaatgtctgtctcctctccccttcctaactgaagtaatcatgctgtagttgttgcttgcccgggtcaccctaattcatgtctcagtgtttgatgttcatggatgagatcacccaagaagatatcaccaggtggtgggtgagagaaaagaccaggagagaatatagaatgtttcagtattaaactacccagtgaaggaagattatagatgaatggttagggaaagccacgttactgaacattagatgtaaattctttcttttaccatatgcctattagtaagtgatgaaaattaattttattcagtaagaaaaaaccaagtatttggtaagagagaaaattagatactaatgccaattacagatagtgaaaaactgagagaaaaagaaaaaaatacaaattctttttcttcttatttttgagacagagtctccctctatcacccaggatggagtacagtggcatgatctcagctcactgcaacctccgcctcccacattcaagcgattcttgtgcttcagcctcccacgtagctgggattataggctcccaccaccatgcccggctaattttttgtgttgggattacaggcatgagccactgtgcccaacccaaattcttttttttccttgagacagagtctcactctgtagcccaggctggagtgcagtggcgcgatcttggctcactgcaacctcccgagttcaagcgattctcctgcctcagcctcctgagaagctgggaccatagatgcgtgccaccacaccgggctaatttttttgagatggagttttgctcttttgcccggaatgcagtggcatgatctctgtagcctccacctcctgggttccagcaattctcctgcctcagcctcccaggtagctggaattacaggcacgtgccaccatacctggctaatttttgtatttttagtagagatggggttttgccacgctggccaggctggtctcaaattcctgacttcaagtgatctgcccgccttggattcccaaaatgctgggattataggtgtgagccactgtgcccggccaggccgaatagtccaatatcaaattaatttgtcataaaattaccatgtaatgcttgttttgctattttcaggaattcagcaaaactccttaaaagtatggtatattctttaacagcaccaagtatgcctgctttaaggcatatatatatatatatatatatgtgtgtgtatatatatatatgtgtgtatatatatatgtatatatatgtgtatatatatatatgtgtatatatatatgtgtatatatatatatgaacatatacatacacacatgtacatatgtatatgtagtacatattttcaccaccactaccaccatgaaaacttaagctggttaatgaggttttaaaaatgacttagagatagacttcatataccctaaaatttaccccaccccccttttttggagacagggttttgctttgtcactgcactggagagcagtggcacaatcagagctcactgcagcctcgacctcccaggctcaagtgatccttcccacctcagcctctcaaacagcagggactacagatgcactccatcatgccctgctaatttatttttatgtttgtagagacaggatctccatatgttgcccaggatagtctcaaactcctgggatcaagggatcctcctgccttggcctcccaaagtgtttacaggcgtgagccattgctcctggcccaaattcacacatctaaagtgtcaaatttagtgggttttagtacattcttagaattgtgcaactatcaccactatctaattttagaacattttcattactcccaaaagaaacctcatacccataagcagttactcaccatctcccctttgcctagccccaggaatctactaatcagctttctgtctctatacatttgtttattctagactttttatataaataatacaatatggggtcttttgtgatcagcttctttcacttagcatactattttcaagattcatgcatgttgtatataccagtaagtccttcctttttattgctgaataatattccattgtacagatgtaccacattttatccatttaccagttgatggacatgtgggttatttccctttttggctattatgaagaatgctgctataaacatttttaggcaagttcttgtgtggacatatgtttacacttcccttgggtatatactagtaatatggtaactttgtatttaatgttttgaggaagtgtcaaaaacttttccactatcttttcactatctcatcagcaatgcaggagggctctaacttcttgatatcttctccaacactttgttagagtaccatttttattttagccatcccagtgggtatgaaatggtatacataaattttgtggttttgtagataatgagctttaagtatacaggttgagtatcccgtatctgaaatacttagaactggaagtgttttagatattgggcttttttacattttagaatatttgcattgtatatttactgcttgagcatcccaaatctgaaaacccaaaatgctccaataaacacttcctttgagagtcatgttggcattcaaaaactttcagattttgaaacattttggattttaattttttgaatttgggatgctcaatctgtatttacatagcactccaagaagatatctggggacaaagatttgccccataggtaaaatctgaaggcggataagtcataagagctgcctgggtccaaagcaaatggcacaacaacaacccagttcagagctctttacagtactgtcactaaagaacttattacttaggttgctttaacttttctgactacaatagaacaaagagtctaatcccagcatctctaccacagtgcatcactgtgataaattaagtgtaaggggcagaaaggttgaaactgtagaacaaaagtaaggcagaatcatttttagtcaactgggattgagtgccaaaatgaagaacagttagaaatacataacaagagaatgcctggtttaccctggcaacattaggtcctgaagtgtctgttttgagggttacccctaatcacaaaagcagacagctcccctaagcagaaggggattttttcaacagttttgttgtttttgagacggagtctcactctgttgcccaggctggagtgtagcggtactatattggctcactgcaacctctgtcttctgggttcaagcgatcctcctgcctcagcctccgagcagctaggattacaggcgtgtgccaccacgcccagctaatttttttttgtatttttagtacagatggggtttcatttcaccatgttggccaggctggtctcgaacttctcacctcacgtgatccatccacctcggcctcccaaaatgccgggaatacaggcgtgagccaccatgcctggccttcagcagatttttttttaaggttagctatgtcgtgattgctgggtataataagtttactcccaacataagcagaggggaatgaatacataagacttaacaggtgaaaaggcatgaaacatgctaaatttttggaagactggccaaatgatgtcaattttcttattaagcaaaacagaccccaagaaaatggtatgaacagtggtatagaataccactgaacccaacattttcacctctctgctataggttattaaaataaaactacaacatgttcaagtgctgagatgcactcctttcttcaaacctgtgttgtttcttaaagcataatccctgaagagaactgtgctgtttaagtaatacatgttattgggtaatgaaacagtcaactaagaataagtaatcctgtcaaaaagcagttgcaaacaatttagacaaagttaattaaatcatgtattaacagattatatcctgtacaaatcagaatacagtcactggtggctgctagaggcttcatctgttttagttctgctatttaaagctcagggaactactgtttttgttcacaactgaaacagaccttggaattaaataagactttagtccttttagaaaatgtaaaaagtataggagttttcatactacaggtattttagcagaaagaagagggaggctaaaagcatattcctctgactgagatactgaatcctacagttaaaggaatttttttttttttgagacagggccttgctcaatatattacccaggcttgagtgcagtggcacaatcttggctcactgcaatgtccacctcctgggctcaaatgattctcctgaggaaaactctaaatttctgttccttggtaatgttatgttactgcgtaatgaaaccgtcaagtgtcaagtaagagtaagtaatcttgtcaaaaagcagatgcaaacagtttagacaaggtcaatcctgtcaaaaagcagttgcaaacagtttagacaaagttaactaaatcatgtattaatagactcagcccctctagcagctgggaccacaggcaactgccatcacatccagctaatttttgggggcattttttgtagagaccgggttttgccatgttgcccagactggtctcgaacttttgggctcaagtgatctgcccgcctgagtctcctaaagtgctgggattacaggtatgagccaccacgcttggcctaaagaatttctgaagatgctttacagtaccagattttgataatctggatcagactaccagagactgaaatcgcaaggaagttggtcccaacactattagcaaggaggcagcttttcaatgtgccagttccccagtatcagtcagaagccacgggaacctgtgtgggaaggaaggaaaagcataggcctgagtcacaaattcaaatgtttacaggagtttggcaggtaacataatgagtcacacagattggtgtaagagaaaagatgaagtggagatcacagctagttgcagaatgagcaaagagatggcaactgttcagctttagtcaactgttatgttgaaatgtaggcccaatgttgtctgataattttaatttttcaagataagccaaagcctaaattatgtaaaattgaatttttaaaatttgggaatcaactgaaattaaaaagggaaaaactaataatgtgaaggccagataaaatatatctatgagataatttgtgacctctctagtttatgtactaggaggacctttagtggcacaaacaagaggctaagattggaagaaaaatcctgagtaggtaacaaggtacaaaggaagcagccaaaaagagagaaagagagagagagaagaaaagaaaaagaggaagaaaggaagggaggaagggagggagggaaggaggattgactataaaggtggtgctgctattaattaatttacttttgggaaacaatattctttggagtttgaattttaggcctcttgaaatgctaaagaaaatgattctactgtcatatccatcagcagacaaattttttaaagatatgcaaaataattaaggaggcaaggacgtagggatagaaaaatctgtagtatcaaatttgtctgtaacttacactaagccaacaaaggtaggagatgatcagtgctaatgtcttttttttttttttttgagatggagtcttgctctgtcgcccaggctggagtgcagtggcatgatcttggctcactgcaacttccacctcccggattcaggcaattctcctgcctcagcctccccagtagctgggactacaggcacgtgctgccacgcccggcttttttgtatttttagtagagaggggttttcaccatgttagccaggatggtctcgatctcctgaccttgtgatccgccagcctcggcctcccaaagtgctgggattacaggcgtgagccaccgcgcccggctagtcagtgctaatgtctattgagcattcaggtgttatcagaattaactcatgtaaaaaggaatcatatattggatttcttcagaaatggaaaggcctactcttagagatttcaaaatgtattaacatcgatcacttgaaaactagggttaaactactgaaaagagccaaaatacttaatcagcttctgtatctctgaagatcaagctgggtcttaatatttttgtgttaacaactcttcgtaaaatcttggaaaacctgagaaaaactagtgaatataaagaggcacataacacccccgcatcctgtcaggaaaaaaacaactcaaaccttgaatgagggtgaccatatagctccttttggagagattatttgtgcttattaaagagaagggtatgtttaggatcctgcctctactatagtttactactaacgtaatacattatttctctgaaaaatattaatggtgaaaatctgatagaagatgcaaactagggattgctaatacagggttgaaagtacttacctattatctcagattcataataatcctgtgtgccttcctggaagacaagacagggtgtctttatgattttagagcatgaatttggaaaaatggtaggtccatttgtatgttaagttcatgtccatcaaagaggaatgaaaaatatgtccttcctcctgttaggggttatgtggctgtgttgtaccaaggtcaattaaagattccttagaaattatttttttttgttgtccgagacagggtcttgctctgtcacccaggctagggtatagtggcatgatcacagcttattgcaacctcaaactcctgggctcaagcgatcctcctggcttagcctcacaagtagctcggacttacactacatgtgcgtgtcaccacatcagggtaattttttttttttttttagagagacagagtcttgctctgtcacccaggctgaggtgcagtggcacgagcatagctcactgcagccttgaactcctggcctcaacagatcttcctgcctcagcctcctcagtagctgggattataggcatgagccactgcacccagtgggttcctcagacattccaagttcagggaagagacgaactatgaaaaatttagtgctgtgcttcttttgtttatatatttataacattctgttttgagatcctactgtttgcattagaacagcagtatgaagaaaggtgaaaaagcctacctttcaagcaaatgaagaacatttcaccaaaaaccaaaaccaaaaccaaacttgtactacatggttttttttttttttaatgcgtaagatgagcttttaagatgaagaaataaactcacatgcattcattcatcataccagctaaagatttttcctagaccagggatcacagatatatattctgtattagtgaacaggcagtccatgagttctccatgggtaacccttaattttgtatttttattttgatggtactctaaagaagagtaataagtgaatattctggatcacctagatgagcactttataaatgtttacaacataacttgggacttaaaatgacaataatttgtttgtactaaggtcaaatgacaccacaatatcatatatatacgaaagtttttaattaattctgatagaatagggttttcaactgcagcactattaactgccattttgcctctttgtttcaaggagcttttctgtgcattgtagatgttaccagcattgctggcctcaacctactagatgccagtagtatcacacccttagttgggacaaccaaaaatgtacagaggcattgccaagtgcctccagagtgacaaaatctccctagtttgagagcaaatgcaatagagaaaagtggtgggagagctgaggtaacacaaggtgtgcaggagaataaacatgtcaaattcaaatgaaccaaagatgtaacaatttctactacattcaggttgaggacagtgtcactaaaacattatcatacaacacattaatgctgtcaatgtgaattttattacattgtaaatctgttttgctttttttcccttaaaaggcaagtctatacattattgaagtttgaattatactttttcctggtttacttttttctttatttttgagatggagtcttgctctgtcacttaggctggagtgcagtggtgccatcttggctcactgcaacctccacctcccagactcaagcaattctcctgcctcgagcagctgggactactagccaggccaccacgcctggctaattttttttatttttagtagagacggggtttcaccaagttggacaggctggtcttgaactcctgacctcaactgatctgcccgccttggccttccaaagtgctgggattatactgtgtgagccaccacacccagcctattgttttctagttaaaacttttttttctttacaaaaattagccgggcgtggtggcgcatgcctgtaattccagctactctgggggctgaggcaggagaatcgcttgaacccaggaggcggaggttgcagtgagccgagatcgcgccattgcacttcagcctgggcaacaagagtgaaactccatctcaagaaaaacaaacaaacaaaaaaaccttttttttcttttcttgagatggagtctcgctctgtcacccaggctggagtgcagtggcacgatctcggctcactataacctctgcctcccggattcaagtgattctcttgcctcagcctcctgagaagctgggactacaggtgcacactaccatgcccagctaatttttgtattttcaatggagatggggtttcgccatgttggccaggctggtctggaactcctgacctcaggtgaactccccctcagcttcccaaagtgctgggattacaggcacgagccaccgcacctggcctcttttctagttaaaacttgactctgaagtcatcgactagtgtgtaacctttctttctttttcttttttctttttttttttgagacagggtcttgctctgtcacccaggctgaagtacagcgacatgatcttgcctcaccacaaaatccgcctcccaggttcaggcaattctcgtgcctcgaacccccaagcagctgggattacaggcgtgcaccaccatgcctggctaatttttgtagttttagtagagacagggttttgctatgttggccaggctggtctcgaattggcttcatgtgactctgtccatctcagcctcccaaagtgctgggattataggcatgagccactgcacctggcctaacctttctaatgccatttttccacctaaaatatcttttctgttaatatatcacagatatttcttaattgaaaaaattctcaagaaccccaaaacttgagtatatacttagatactaaatgtcttaattaaataaagataatctgaaagagttttttatttgttttgtttttttgagacaaggtcttgctctgttgcccagtgtgaagtgcagtggcatgatcatggctcactgcaacctcaaactcctgggctcaagcgattctaacacctcggcttctggagtagctgcgattacacatgtgccaccacacccagctaattacattttttgtaattagcttagattggggggcaggtcttgtacattgctcagggtggtctcgaactcctgggctcaagtgatcctcctgccctggctttgcaaagtgctgcgattacaggtgcgagccaccgtgcctagcctaaaatttttttttttttgagacggagtcttgctctgtcacccaggctggagtgcagtggtgcgatctcggctcactgcaagctccgcctcccgggttcacgccattctcctgcctcagcctctccgagtagctgggactacaggcgctcgctaccaggcccggctaattttttgtatttttagtagagacagggtttcaccgtggtcttgatctcctgacctcgtgatccgcccgcctcggcctcccaaagtgctgggattacaagcgtgagccaccgcacccggccggcctaacatttttaaattataaatactttgaaaaactggaaaaggtcctggatagaagtattcactgttgaatttttctttcctgaaaaaccagtctttgaaagagtaaaaaagtaactgccaatacagcttgtctatatatatatgctctataaatttctcttcttcgaatcaagcaaagctgacaatgtattaaaagaatgtccacggccgggcgcagtggctcacacctgtaatcccagcactttgggaggccgaggtgggcggatcacgaggtcaggagttcgccccatctctactaaaaatacaaaaattagctgggcatggtggcaggcacctgtaatcccagctactcaggaggctgaggcaggagaatcacttgaaaccagaaggtggaggttgcagtgagctgagatccaccactgcactccagcttgggcgaaagagcaaaactccgtctcaaaaaaacagaaaagaatgtccaaaggtatgtagtaagttgaaaagctgtcttgaatacaagtccattagtggaagaatcttaaattggttaggtatatttaaatgggggagactgttccaaaaaagtgtaataccacaaccagcttacaaattcttccagttctagtaagaataaaacttggtcaaagattgccttttacctgtgcactgaaatcttatggttggtggaagatgaaggctaaaaaaaaatcttagttcaacaagtccagcttaggagacatcattccaatgctcataaatttacaagtttaacaaatacaactattgtaccccccaaaaacctagtaagttatgttaaagtcacccaagatcaaatggcttgaaattctttaacaagccagaactgtcctataggtgtaacaatttatttttcccttctaaactctcccagggggattattgccatcttctgtatatcagtaactagttaggtacaattttctcctctaaaatgatggggtggcggcgggggagggggcaaagactgcaaagtgtaattcatttatcagctcttcaacatgcagcaacagagttttttgttaaagttaagatagcatctaattttattttccttctcaaaatttatctaacttccaaggtatattgaatagcaaaatgacttaataatagaaaatggtagccaataaagcatgaaatcttatgtagggaacttgaaaataacagtctgctgaataactcttcaaagtttaacgcgttaagagcagaaatggaaacaaagctcccagtgaccctcagctgaattacaaaattaaataaaaacttagaaatcaataaaaggcaaaaacattatataagatttacaaaacacaatttgtcaaatagtgtatatgtgggagtgtgggctggaggtggtgtctatgtcaggatttctgccactgaaaaaacaaagtgtgttggatgactgcagataaagattggcagacacaagaaatcatagacaccaagttttggggggtatactcataaaatccaattgttgtaacaatagataggtaccttcttctgttagcaagtaactacaactcacctgcttgtgtgcatgatcataggagttgatatggttatcaaattcctgatgtttctgatattgcttatcacacagttcacaataaaagttggctctgaggtcttccaaggctttggcaattgccttctctttgtcaacataatccttcaagacccatgaaatacaaagaaacaaaaaatgaacttggtaaaactttaagtgaatgttatagagaaaacagtctatctgagaagacaaaaaagggcttttcataatatttagtggtaccagtaaaagctggatgaaacacaagtggtactttggtgggtaatctgtgtgtcgtcatactaacaattgtcttcaaataaacaaatgtttaaaaggactaaggatgctcaactgataagtataatgcaaatattccaaaacccccaaaaaatctgaaatctgaaacacctttggtctcaagcattttggataagggatatacaacctgtattaatagtctagttttcagacacgaaggaaaaaagcattacctgagtctgtagccaatgatggagttaaatattctatggtcattctacatataagctgcactgcttggaaagccaacccacagatatgtgttatctgctggtctcagcgagattgaaaactgtgggactcttacatgtgagaggaggttggagaaaaacaacaacaacaaaaaactgtgggactgactcaaaggcagtccaatttgcctcagcagtttcacttaaaaactagacatcaaaagacatctcaaaaaggaaaaaagagaaaacaattaaaagatacctcaaagcaagttgagtatattcatttgctaatgtcgcacagaaggatgagaaagggacaggaatgctaagtgactacttgcttgacttttagagcagggtagatgcattactttcataatgagcaactccttctagcagactgacctaaaaaagataagtcttatctcaaagactatatctacagtttcaaagcagctctatcatctcccataagagctacttaatcagtaaacaagaaaaggttattattttctggagtggcagtactgaactaatttggacagacttattaaaactgaaaagtgagtatgtgtagcacattgttatttttgccctatctaatccttcacaataattttctttgacagtcccggacagtttcatgttgtttggctattaaacgacttgtggcttttttgcccaggctggagtacagtgcagttcatggctcactgcagtcttcacctcctgggctcaagcaatcttcccacctcggcctcccaagtatcttggactataggcgtgtaccagcaaacctagctaacttttgtattttttgtagagatgaggtctcactatgctgccaaagctggtcatgaactcctgggctcaagtgatcctcccaccttggactcccaaagtgatgacattgcaggtgtcagcccccacacctggctgcaaatttaagcaacaaaactagagttcctggtatgaatacagcagtataggaaaacagctttgattttcttcttgggtatcataaaaacaaaattatgaattaaaaaaaccccaccaactgcattttcagaagaactgggcaacagatatgatctggagtatgaaaaacacacagaaggaaagttaagctctttatagaacctgaatgagggaaatgtagtagaagccagacaaggcaaagctaagcaatatcaaaaaagccaaaggtggcaatttcagaaaatggcaaaacatatatcctgtacataaaaggatcctctgaaatgaatatacctacatctcttgcactcatcaagaatttctgagatctgggaagaacaaagggatgaacttgggttagggtggatgaggaaacatttgcagtacaaagaatgcacatagagaaaagcaaaaagttctgcccaattgcggcagatctaagaaaaggctgaggccaggtgcggtggctcacgcctgtaatcccagcactttgggaggccgaggcaggcagatggcttgagctcaggagttcaagaccagcctgggtaacacagtgaaactccggctctaccaaaaatacaaaacattagctgagcatggtgtcacttgcctttggtcccagctacttgaaaggctgaggtgggaggaccacttgagcctgggacgcagaggctgcagtaagccaagattgcgccactgcactccagcctgggtgacagagtgagaccttgtctcaaaaaaaaaaaaaaaaaaaaaggctatcagcacatgctcactaaaggaagatccactcaactacacaggacaagaaagggcacatagtgtgacaatgaaaatggtcccagaacaatcagtgacaatcaatagtgtagtaaagttattgaatcttaaagacagactcctttcagcagctaggcaaaaacaatcaagaaggggaagatcaggccagcctttgatctcttcaacaacacacacacacactctctctctctctctctctctctctctctctcacactctctctcaactccagaagacagtggtacaataaatactataagatatctaaggaaagaattaacttaggattttatatgtatctttcaaatatagggaatacatacacgtatatatggagttatatgtatgtgtacatatatacacacatatacataagttgatatatatgtaattgcctaaattaatattactattttttttttttgagacagcgtcttgctctattggccagactggagtgcagtagtgcaattacagttcactgtagcatcgacctcctgggctcaattaatcctcccacctcggccttctgagttgctaggaccacaggggcatgccactatgcctggctaatttttgtatttttcgtagagacagggtttcatcatggtgcccaaggctggatgtgaattatttttataggcttatgtttatataaaatacatatatatataaataattcaagaaacactgtttgcacaaccacttttaagtaagttaatagggtacaaaattcagaaataatagaagaaaactcagcaaaagaactggcagactgctttaaaaccatttactcctataactaaggttaaaagaaatagggctattaaagtatatacatataactgtaacatatacatataactatgtatgttatatgctgtcagaaaatagaaatgatacaaataataaaaaactgggtgggcaggcagaagcagatatgaatttgagtttgcttacttctgcaaactcaatagaagtaaaaagaactttacaaaacatgaaaattattaagtaatagaagtagtgtacataatataataattaaatggtatgaagccacatactaagaatggccattttacttattaacattatatgatagagtttttaaaatggaagaggaaagaagagaaaacaagctagctttttattgcttatagtacgaaaataatggacactcaaacatgggtaatttcattaagttataaaggtaactagaacaacacaaatataatccatcctatatccatccatccatccatgtatccatccatccatccatttatttcccactttgagaccacataataacttaaaaaataaaataggccaggcgtggtagcccatgtctgtaattccagcactttgggaggccgaggcaggcggattacctgagctcaagagtttgaaaccagcctgggcaacatagcaaaaccccatctttaccaaaaatacaaaaaattagctaggcgtggtggtgtgcacctgtagtcccagttacttggaaggctggggaagtccttcaaaaagtactcgtaggctgggtgcggtggctcattcctgtaatcccagcactttgggaggccgaggtgggtggatcacctgaggtcaggagtttgagaccagcctgaccaacgtgatgaaaccctgtctctactaaaaatacaaaaatcagccaggtgtggtggtgggcgcctgtaatcccagctacttgggaggctgaggcacgagaatcacttgaatctgggtggtggaggttgcaataagctgagatcgcaccattgcactctggcctgggcaacagagtgagactccatctcaattaaaaaaaaaaaaagtacttgtagaggccaggcatagtggctcacacctgtaatcccagcactttgggaggttgaggtgggtggacagcttgagcctaggagttcaaaaccagcctgggcaacatggtgaaaccctgtctttacaaaaaatataaaaattagctgggtgtggtggcatgcacctgtagccccagatgctcgggaagctgaggtgggaggatcgcttgagtccaggaggtcgaggctgcagtaagctgtgatcactgccaccgcacttctaggtgacagagtgagatcctgtctgggtgacagagtgagaccctatctcaaataaacagtactcatagaatatttacacagacaaggccaggcacgctggctcatgcctgtaatcccagcactgtgggaggccgaggtgggcggttcacgaggtcaggagatcgagaccatcctggctaacatggtgaaaccctgtctctactaaaaatacaaaaaattagccgggcgtggtggcaggcacctgtagtcccagctactcgggaggctgaggcaggagaatggcatgaacccgggaggcggagcttgcagtgagccgagatggcgccactgcactccagcctgggcgacagagactccatctcaaaaaaaaagaatatttacacagacaaaaagcccattataggctatagaagaaactgtaataaagtcagaaatgaagaagtaatatgcacaacatatatcaacacagtataatacagctaagaattaacaaaaatgtttaaaagacccttccatgaatctgaagctgcagaattttaaggtaaaaaaggataatgacaacattatacagaggctaaagtatattgctttaagaagttaagcctatgtgtattccttgaacacaggtttaaccccttacagcaatggaaacaagaaaataaataaatgtcacactctggagaaaatcttgtgtgtatatatatatacaagaaaactgattccacttatataaagttaaaaaacatgtaaaactaggccacgtggtggctcacgcctgtaatcccagcactttgggaggccaaggcaggtggatcacctgaggtcaggagttcgagaccagcctggccaacatggtgaaaccccgtctctactaaacacacacacacacacacacacacacacacacacacaaaacaacaaacaaacaaacaaacaaaaaccagctgagcatggtggcacgtgtctgtaatcccagttgctcgggaggctgaggcacaagaattgcttgaactcaggaggtgaaggctgcagtgagctgagatcgtgccactgcaccccaacttgagtgacagagtaagactccgtctaaaaaaaaaaaacaaaattagctggacgtggtggcgcacgcctgtaatcccagctacttgggtggctaaggcatgagaattgcttgaacccgggaggcacaggttgctgtgagccatcgtgccactgcactccagcctgggcgacagagcaagactgtctcaacaaagcaagactgtctcaaaaccaaccaaccaaccaaccaactcaccgacccacccacccacccactacataaaactaagcaatacatatttaggatacaaaacacattaaaaaaccattttaaaatgcaagggaaaatagaagaggaaggaacacttcctaatttattctgagtattaccctgatacaaagacattacaagaaaactacagactaatatcttttctgtgtacagatgcaaaaatgctcaacaaaatgctatcaaaccaaattcaacagcatattaaaaggcgaagtgggatttatcccaggaactcaatgttggttcaacatacaaaaatcaatcaatgtaatacaccactacaatgtaatacaccattattaacagaatataaaaggaaaaaacccacaaggttatctcagtagatgcaaaataagcatttgacaaaacccaatactctctttcatggtaaaaacactaaacaaagcaggaatttctagaaattaggcacttcctcaacctgatgagaacaaaaaacccccagctaacatcataatggtgaaagactgaaagcttctctataaagatcagaaagacgacaggaatgttcactgttgcatttttttttttgagatagagtctcactctgtctgtcgcccaggctggagtgcagtggtgcgatcttggctcactgcaacctccgcctcctgggttcaagcgattctcctgcctcagcctcctgagtagctcggattacaggcacacaacaccacgcccagcttttttttttttttttgtatttttagtagggaaggggtttcaccattttggccaggctggtctggaactcctgacctcaagtgacccgcccaccttggcctcccaaagtgctgggattacaggtgtgagccaccgcactggccacagtggtgataattttacaacactgtaaataagctaaaaatcattaaattgtagtattgctataaaatgactaaaatggtaaatttatgttatgtgaattttatctcaacaacaattttacctacaaaattgtgagggggccaggcacagtggctcacgcctgtaatcccagcattttgggaggctgaggcaggcggatcacttgaggtcaggagttctagaccagcctggccaacatgacagaaccctgtctccactaaaaataccaaaataattcgctgggtgtgatggtgcacacctgtaatcccagctactcaggaggctggggcaggagaattgcttgaaaccaggaggcaaaggttgcagtgagctgagattctgccattgcactccagcctgggtgacagaacaagactgtctcaaaaaggaaaaaaaaaaaaaaaaaaaaaaggcgaaaaacacaaaaatcagcatagtgtttatctctaaaggagacagaaatgtgatgggatcatgaagttactgatagtgctctttttcttaaattgagtagaaaatacctaagtgtttatagtttttctttatatctcacatattaaaaatatttaataaaataacaagaatgtcaaatgagactgcagtttttgttttttcttttaaaagtctggtagagctatttggctctaagactatatacaagtaaaactttgataaaaatgaaaattaaaaaataaaaatgggaggctgaggtagggggatcatttgaagtcaggagtttgagaccagcctgggcaacatagtgagaccctatctcttaaaaaaaaaattagccaggcatggtggtgcacgcctatagtcttggttacttgggaggctgaggtgggaggattgtatgagcccaggagtttaaggctgtagtgagctacgatagcaccacagaactccagcatggacgacagagtgagatcccatctctataaaattagagatgagagagtgatgaaaaggaagcagtcagagtagtgactaagaattctggttctaaagacaagtgaaaagagaaggtggtagctatatggagagtaaatcagagtgggttttttttttttttttttaattttaggattccctctcccaacaaatcttcaagtatgtttactgttgataggaaaagaacaaataaagagaaaggttgccaatacaggaaagaagtggaaggtctttgataagacagggagagttaggatccagaattcagatgtatgtacaaattatcatttaacagatggtgaaacaaaagagaaatattgaagtatgagagcaggtgaaccctcgtttgatgtaggatagtatacgtagatgaaggcattactacctgatggtccaaattctctttcttaactaaaaacatacgggaaggcagagatacgacaagggtagttaaggaaagatgaaggctgagtaccaatgtttgagaatgacagctgagaggactaagagggacatgacacatgagaggattaattggcagctctgagggcccagtgaggttggcagaaagggtatagaaataaagaatgcaagtaatgcattttgtactaacgggacaggcttttggtgagtatgtatgacaaaaggactaggaggaaagggagttggaatcaaagtgctgtgagaggtaaacatgagtgtgtggtgctagaggggaaaagtacaaattaaggaggagctaagttactaaagcttccaaagtcatgtgaagttgaagaaaaaatataggagaataaaggagtgacagcaggaaggaaaaaagaccatggtcagataataggacatttaagattttagaaacagtgtagttcagagttgacagggtttcggagtaaatattttgatcaataagatggggaaagtaattcttgctcttgcccaggctggagtgcagtggtgtgatcataggtcactgctgtcttcaactcctgggcccaagtgatcctcccaattcagcttctctaagtagctgggatttataggcatgcaccaccaacacctagctattttttttcttttttctttttgtagagacagattcttgctacattgcccagactgctctcaaactcctgggctcaagcaatcctcccaaagcacagccgtgatccaccgcacccagccgagaaataattctattaccagggagagagcatctcaagatactatgtataatcttatgaggctgtgaattactgaggtatttcatttatttttcactcgacagtgtaacttttacttgaaaaataaaaatgtattctttataatgtttatatttcagacagtacataaaatgaatctggcttttctcactatttcaaaatatttattcattcaactaatatttattgagtacttatgcaccacacactgtgctggatgcaggatatatactggcagacaaatagacatactctctctcctcaatgccctttctgactagtacagaaagcagaatataaattagtgaataaaaatttataattacaaattgtaagagaggttgttgcaagagaataaggcagagtggttaattatttaaatgagttgattagggaagatctataatgaggtaatatttaagctaaaacccaaaggagaaaatttaaccaagtgaaagatgatgaaacatggtgtcatgaccactcttgtgcctagagaaagaatgtagccagaaaaagagggcccaggtctgaagctgaggaactccaatatctgaagttcaggcagaataaacagcagccaacaaaggaatctacatagaagcagcaagacagataagaagcaactaatctaggaaagtataaattcttcaaaaccaagagtaatgaaaatgttttaaagaagaaagagtatgccaggcgcagtggctcacgcctgtaatccccacactttgggaggccgaggtgggcagatcacgtgaggtaaggagttcgagaccagcctggccaacatggtgaaaccccatctctaccaaaaattcaaaaaaattagctggccgtggtggctcatacctgtagtcccagctactcggaggctaaggcacgagaatcacttgaacccgggagcagtgagcttagatcacaccactgtactccagcctgggcaacagagtgagactcagtctttaaaaaaaataataatattaataataataataaaataaataaataaataaatgatttattggatttagcaaatagaagtgtttggtggccttgaataaagtggtttggtgaaaactgctaaagtcagtataaataggctgaagagtgaataaagagagaggaaaggagaagaaaaaggggaaagaaaaaggggcaggaaaagaagatgagttggttatattatagttctggataaaataaaacacacaaaaatttaatatatagctaagctaagttcaaaaacaagaaagggggtcaagcgcggtgacttacgcctgaaatcccagcaaactgggaagccgtggcaggcagatcacctgaggcaaggagttcaagaccagcctggccaacatggtgaaaccccatctctactaaaaacacaaaaattaggcttggcgtggtggctcacgcctgtaatcccagcactttgggaggccgaggcgggtggatcacaaggtcaggagttcgagaccagcctgaccaacatggtgaaaccccgtctctactgagtgttggggttacaagtgtgagccactgtgtctggcctctgcaagtgttggggttacaagtgtgagccattgtgtctggcctcaaaggacttttaacaatttttactgctaccactacttgaatacctactatgtaacaggcattgtgttttcaaacactaattcatgtaatctttctaacacactttagaagtaggtattattatctctatagtttatacagagccaataaataggaatgtaatagaaatctgagatctactactaattaccaccaaatgtcaaacaaatgctgttagcaacagtgatgattttcaacaaaatttgagttctttcttattcagtgagcacctccccatctcccaatgaatagctttgtttaaataccttgtacttttgtctcagctcttctgtgtcttctttttctacttctaggacacggcgccgttcggtagcatcttcagcataatcaagcttgacaaaaatagatatgattagatttaattcctaaagtacccccaagattagctatgaaaaagttatttgcacaactacagtattatctgaaaacaaaaaaaaattgtaattttgcttagctactgcttgctttattgtcacctcacagagaaaatcacatgcaaaatagtttgttactttcaggctggtagtttccaaaaggcacatttgttgaaagtagacttcacttcaatgttaattttcttttctttctttcctttttttttttttttttttgagatggagtttcactcttgttgctcaggctggggtttaatggcatgatctccgctcactgcaacctctgcctcccgagttcaagtgattctcctgcctcagcctcctgagtagctgggattacaggtgcccgccacaatgccctgctaattttttttgtattttcagtagagatggagtttcatcatgttggccaggctgatcttgaactcctcacctcaggtgatctgcttgtctcggcctcccacagtgctgggattacaggcgtgagccactgcgcccagcgactcctaattctttgaaaattgaggctgggcacagtggctcacacctgtaatcccagcactgtgggaggccgaggcgggcgggtcacctgaggtcaagagttcaagaccagcctgaccaatatgatgaaaccctgtttctactaaaaacacaaaaattacccgggcatggtgtcatgcgcctgtaatcccagctacttagaaggctgagacaggagacaggagaatcccttgaacccgggagacggaggttgcagtgagccgagactgcgccattgcactctagcctgggcaacaagagcgaaactccatctcaaaaaaaaaaaaaaaaaaaaaaaaaggaattaggagtcaatgaagaaaatattttaggcaatgaaaagcaggtattacaggtgacagccgtacccaattctacaaaggcaaagcttttatcacagcaacattttaagagctgagcaacactgcctactgaagcaagtaccaaggtctggatctaagtctgatattgccttgctgtataaccctcggcaaatcacttaacttctttatgtgccagttaaaacagcagctctgtttatattctatttgtctcaaaagtagcactaaatgaaaatgtaaaatatattttttagtcatccaaagaaaaatattaaaactacatttcatctgataaatgtattcttgcacagacatctgaatttggaattagtattatttcaaaatatctcacaaaacttatgagttaatgagatcaatttacctccatttccatgcgacccatgcccatgacatcatacttgacaacgattggaatgggatctgttctccctgtaacaggaacacataatcaaggtaaggtgcaaagccaaaccaacagctcattttacacattgggttttgggtggttagagatcttgccttggagtgcagagaccagaaagctacagtgaaccaaacacaagccattctcacagcttacactcaagaccttcctttcctagtttaaacccaattaaccaccttggctgacgtccagttgggattaatttcaaattactatggcaaaattacattaataagtaatgcaaagcacttttaagcaatggcatcaggaggtttaaattgtaaaactttaaaaattccttttaagatccccaaataacttcccatcaagtatcactttactctgcccactgatatcctcctacacaactttttaacctagtttaaaaaaaaaaatctcaactggcatggttaaatagaaaaagtacatttttaaacatgatgcagtaaaactttataattacaactcagtatgttgaatttgttttcaaaagatgctttacaattttttttgatgttcctcatagactaggagatgctttacaatttaatggggctgtgaaaagtttaaataaaaagaaacaattagttgcccttagagaaaagaatagttttccttttaatctggtgctctaaagtcccatttcctagagtggatttaacactggctgcgagggtaactggtaagctgtgaaaaggactagttgcgaagaaaattgactttaaactaattgatctatgctggataatttttttaataaatatatatttaatccactcataaccagccaaacaaagcaaaatggggcagacaagcactttactaccacagctgttttacatcacaacctgcgctttttattgtgatgtaagcccactgaaaagaggacttaccttatccgttgtacacctttagtgaaaaaacacaatgtttacttccctcatcatttcactcaggctggtgtaaacaattggtttttttggttgtgttgttgttgttgttatacacacacacatatatatatacatatattatacctttgggctaaaaatggagttttcttaggctaaatctgaggcattaccctcccaaccccaaaaaaaactttttaaaaaataaatgccatgatcatgactggttttggtcctgcaaaataaagaagaaaccatgttcaaaacgaccacaaccacttgtactcggtggctctatatttgtggaattaatttttgcctttaagatggaatgaaaaacaaattcataagtttaactacttatgtatcctattattgtttttaaacaataaatagggagaattagaattatcacagtaaaaaaacaaaacaaaaaaaccaaacccaaactgttaaagaacatctcatgtcagaaaaaaaaaaaaaacaaaacaacaacttctagaatacagccttcttttagatacaatcaaaggactgccagtaaagcaaaatgaaaatgcattactaccctatgcccaatggtataataaataagcagtgactgcaatctttagcaaaaggaccaaattaaagacaggttataaaaatgacttcctaggtgcaatatcactttcataacgtctcagtcagggatttactggtaaaaacaaatagtccaatgaatgaattaaaaagaaatgtcaaagcaatttattttggtatcttttttgatctgtcagaattcgttttgcaagaatcaagaaagttttggtacaaattcattacctctgtaaacccctgtttataaactctgcattagtacttttgccttctaaggcagtcaaagtttgttttaatttatttataaattgcagtagcaagtgctagtgcccattacattgtggggaaatcaagtttttgacagtattagaatttaatgttttaactgattttattggcagttctaacacaaacagatacatcccttcttaacattaccctttaatgaacaaggatcagacaagttgcataaggaaaggaaaggaaaatgaaaaagaccaagcagaaggatgaaggctacaacagagaaagtaagcctaacatattggtgcactgatgacaaaaggagtaattcagtctgaaaataaaaaattaccactgctaagattaccatcaccacaacaagtccaggatcataatgctgtaaaaaagaaataccatttgttaggcagaaaccattagggtaggaaacaggccttctagcaggcagacaggatggggtaaagttaacagttgggctttgtccctcccccaatctcagccggggacagaggaaggacattttgtgctacagcagctgttttcatactggtcagaccaaggtgtgagatttttgtactgctacttgagaacatgaacaacaccctcttcaataaggcagggggtagggtgtcagtttaaagtaagagaactagctctagtttccaatctttcatttaactattcattctcgtaaatcagtattcagggcccaaggtaggacttttaaaagaaatgacatctaagactctatcagatcaactaactggacagtaatcaagtcatttacttcaccaaaagaactctaggaggcttggagtatgggtgagatgtccgcaagacttctctagaaatatatatataaaacaattaagcagtctagaaaataatcttagatcttcagtgcttggagaactttgtgcatttgaattctgttatgaatgaatacaactctttaagtggctctcctcagaactttgcttcctgttaaccgagacttcccaggctggccaatatccttctttcagcacacaacaaaaccaatctttgaaggacagctctagagaaaccgacatcacaagagctgtcacatttaaaattactccactcagagttaactcacagaaaataaacagtatgactttcaaagcaatcttgaaggtgacattattgcctgggccaagtagtaatttcttaacattattaaagaggctatagaccaaggaaagatcccagtgggaaaagacaccaaacactacatacaggaagaggctgcagcattaaaaaacaaaacaaaacaaaacaaaaaaccccctcagtttattcagttgctatcaatgataatcctaaagaacatcacttacaatatctgaataccaatttgtagtgatgacctcaaaaggtaggtagcaagagtgtctgctaatatgtattctctagaaaactcaactttttttttttttttttgagatggagtttcgctcttgttgcccaggctggagtgcaatggcgcaatctcagctcaccacagcctccacctcctgggttcaagcgattctcctgcctcagcctcccaagtagctggggctacaggcatgcaccaccgtgcccggctaattctgtatttctcgtaaagacggggtttcttcatgttggtcaggctggtctcaaactcccgacctcaggtgatctgcccacctcggcctcccaaatgctggaattacaggcgtgaaccacctcgcccggcctcaacttcttttaaaaataaaatccaggttccctacttcttggtttcttttaaaatacagcaaatattatttaaaatatattaaattagtgagaacatttttgttgcttgtttcactccaaaggaagcaacttcaaccagaacactaaataatctccttaaaagaaactgtcttcctcaggaaaagatctacagacacttacttggccaactggagaagggaaaggaaacacatgcaaaatcaagaatatgccaatatcaatgtattaatctgatggaaaacaactgatactcatattttctaaatcaaaaccttaaataatgtttcactaactggaattacacatttattttttagagacagggtcgctgaggctggagtacagtagcacgatcagctcactgcagcctccacctttcaggctcaagtgatcctcttgcttcagcctcccaaagctctgggattacaagtgtgagctgcacatcagcctattgcctattttaaaaggcagttttacttatgcaataatagaaattcctaagtgctctcttatatatgcaagtcttgctaaaatgtgaaggcattataacataactaaagaaagaatacagtcaaacacaaaaacccactgattatcacagccactctgtcattgagaacaatccctcaggaatcagttctgattttaaaatggttaaggttacatcaatctacaaaactgtcctaaagacttaaactacagagaaagaactcttttgttgttttttgggaaacaccatttttttttgagatggcgtctcactccgtcacccaggctggagtgcagtgacgcaatctcggctcactgcaacctccgcctcccaagtttaagcaattgtcctgcctcagcctcctgagtagccgggactacaggtgcaccactacacccagctaattattttgtatttttagtagagacagggtttcaccatattggccaggatggtctcgatctcttgacctcatgatctgccaccttggcctcccaaagtgctgggattacaggcgtgagccactgcacccagcccagggaaacactatttttaaagagacaaactctaggaatagaacaactgggaagaatatattaaaggacaaccataatctagtaatcagccatactttagaaacagaagacatatgatttccctgcagaaacaaattagaaaggaagaagcttctacagtgattaaaacactggttgaattgtcaacagatgtaagaataccacaatgtaagatgtaagaacaccacaatgcatctctgctgctttccccttacagagattcaatacaaacatttacaacaaatattgagttttggctaggcatggtggctcatgcctgtaatcccagcactgtgggaggctgaggcgggcagatcacttgaggtcaggagttcgagaccagcctggccaacatggtgaaaccccatctctactaaaaacacaaaaattagctgggcgtggtggcgggcacctgtaatcccagctactcaggaggctggggcaggagaatcactttaacccgggaggcagaggttgcagttagctaagattgcaccactgcactccagcctgggcaacacaacgacactccttccccccgccccccaaaaaaatcaaaagcccgggcacggtggctcaggcctgtaatcccagcaatttgggaggccgaggcgggtggatcacctgaggtcaggagttcaagaccagcctgaccaacatggtgaaaccctgtatctactaaaaatacaaaattagctgggcatggtggtgcatgcctgtaatcctagctacttgggaggctgaggcaggagaatcgcttaaacccgggaggcggaggttgcagtgagctgacatcgtaccatcgcactccagactgggcaacaagagtgaaactctgtctcaaagagacaaaaataaaataaaataaaataatatatatatacacatatatatgtgtgtatatgtatacgtatatatatacatatatatatatatagagagagagagagagagagaaggagagagagaaagagagtttctactatattcaaggcactgttctgggcactgcatatagtgatgatgtaaaaaaaaaaaaaaacaccacaaccgcagcaccacgttccatgaattaccaataaataggcaaaatagagtaatctgaccagctggaacttcagctgagaatgagagaaaacagaacatttgtgaagctaatgcataagcagttaaaaaagcttaaaaatgtctgaagttgtcttttaaagatatctaaagttgtctttaaagacgaccttaatgaagtgcaagtaaatataaaagccatcaaaaagtcacaaaatccatgttttttttgagacaggatcttgctaagtcacccaggctggagtgctgtggtgccatctccgctcactgtaaattccagcttccaggctcaagcaattcttgcctctaggcctcctgagtagctgacactacaagtgcctgccactacatctggctaatttttgtatttttagtagagatggggtttcaccatattgctcaggctggtctcaaactcctgggcttgagtgatctgctcacctcagcctccaaagtgctgggattacaggtgtaagccaatgagcccggcctaaaatccactttcaaaagacaattaaaactgggctgggcttggtggctcacgcctgtaatcccagcacttggggaggccaaggcaggaagatgccttgaggacaggagtttgagaccatactgggcaatagagcaagactctgtctctccaaaaaatttttcttaaaaaaattagctgggcatggtggcatgcacctgcagtcctagccactgaaaatattgaggcagaaggaccacttgagcccaggagctggagtgagctatcatcgcaccactgcactccagcctgggtgacagagaaaaaccttgtcgaaaaagagaaaagaggggaaaaaagaccattaaactgataaaggccaagaacctacactgacatctttaaagtacttatttcttctttttaagtaatgcaaatacatatgtgaaaatcaagataaaaaaaattacgcaggtgattctctgatttgcaaaagtattcaaaataggattcaagtcatgttaatggacttaaatatcatttcatttattgaaactgtgatcacatgaaactttcagaaacactgaataaaaaatggtacatttatttccaaaccaaagcttaatttttgcaaatttctcctgaaaatgagtctttaggtggcatagaaacaattattactttcagcatcgtttagatatttttctaagcaactctaacatatgatatatgctacctctcagaaaacattaactgaaaacattgagcacattacttaatccctagagagtttttaaggtttaaaaaaaaaggaaaaactttctacccaaaatagagttcaaattatccagtactacaaaaacctactatattcttgccatggcctttttagtgacctatacaacaaccaaattaatttgatttttttcttcctttatttattttttaaaacagggtctcaccatcgcccaggctggagtgcagtggcataaccacggctcactgcagcctcaacctcctgggctcaagtaatcctcccatctcagcttcctaagaagctgggactacaggtgcacaccaccacatgtggctaattcttgttattttttgtagagacgggatttcaccatgttgcccgcccagtttgttcttgaacttctgagctcaagcaatttgcccactttggccccacaaggtgctgggattacagacatgagccatggtgcctggccaatttgattttcaaatacagatgttttctaaggcacacaagtttaattatgacctaaacgaatttccatctgatactttccatctaggataaaatagttcaattttaatcatataactaaatatattaataaacaggaacaaaggtggggcaaaaggctttagtgaaagtgttgttaaatcagaatgttaggcctgggaaggatatctcatccagggataacatgatatcctcaagcccttagaagagataataaagagaattcatgagttactttcaattaaaaaaaaaaaacctaaagaaaatcatacttttacatgagatacaactgttttagctaaaattatactgactcactaaagattgcctcaagctaaccaccatgctaagatcaatttgttttttcaaatgggaaagccaaattaataaatacaattttggggtaaaatagtctaaaacatggggctgaggagatacggaaaaaaacagttaagtctttagtttaaagaaaaaaaaaaggccaggcatggtggctcacggctgtaatcccagcactgtgggaggccaaggcaggcagactacttgaggtcaggaggtcgagatcagcctggccaacatggcaaaacctcgtctgcatttaaaatacaaaaattagctgggcgtggtggcatgttcctgtaatcccagctacttgggaggctgaggcaggagaatcacttgaaactgggaggcagaagttgcagtgagccgagatcacaccattgcactccagtctggggcaacaagagagaatctccatctcacggggggaaaaaaagtggtagcacttttgtgccctgagttttacttatgtttatatccatatctgacacagtatgtaggccagaatggcatttagttaaaaagcatttgttgactcagagaatgaacatgttcgtagcgggtctgaaacttgttcaactgtaaatacttagtcatcatgatgcgcgccgcttaacatcacaagatactaatgatttaactctcataatcaaggaattattttatcaagtagaacatatcactatattagaaaggtctccatatatcaaaaaatatgtaaacttttataatgaaatatttgagttttacattactggtcattagagccttaaggcttgttcaatttcatttcttgttatcactcagtagtcaaggagaaggaagcatcaaatgtttaagaaaaaaatactaaagaacttacattcaacatatatcgacaaacttttaaaaaactgaattggaaagttgccataaccagtttcagtgaaggaaaacctcaagtcagcccccataataatggtgttttccaggaaattaggtttagggtaagtggtctgttagaaattctgaaaacatttttcctctttttaaaaaacaggtcacagtaaaaattaatggcttccttcaagtacccagtacactcctatatacatgtaggtagaccaaaaattaccagtgagctccaatctatgtgagtatttctttttcttttttttttttccccccctaagatggagtttcactcttgttgcctaggctggagtgcaacagcgcgatctcggctcactgcaaccttcacttcctaggttcaagcgattctcctgcctcaagcctcctgagtagctgggattacaggtgcccgccaccaggtggctaattttttgtatttttagtagagacggggtttcaccatgttggccaggctggcctcgaacttctgacttcaggtgatccacccacctcatactcccaaagtgctgggattacaggcatgagccactgtgcccagcctacatgagtatttcttgattaatgaattccaaaagaaaaaatatacttgtaaagagtggcaacatgaaactcaggggatctgaattacagttctgtcactaatggggcatgtgacccattattagctattaatttctttttatttttagagacagaatctcaccctgttgcctaggcaggacggaatgcagtgaagtcatcatagtttactgtaacactgaactcctgggctcaagtgatcctcccacctcagcctcctaagtagctaggactacaggcactcaccaccatgtgtggctaattaaaaaaaaaaaaatttttttttgtagagatggtgtctcactatgttgcccaggctggtttcaaactcctagcctcgagttatccttctgcctcaacctcacaaagtgctgggattacaggtgtgagtcaccatgccgcctatattagtttcgtgatccaaaaatagaggagttaaaggccaggcgcagtggctcacgcctgtaatcccagcactttgggaggccgaggcgggcagatcacgaggtcagcagatcgagaccatcctggctaacacggcgaaacccagtctctactaaaaacacaaaaaattagccaggcgtgtggcaggcgcctgtagtcccagctactcgggaggctgacacaggagaatggtgtgaacccgggaggtggagcttgcagtgaagccgagttcacaccactgcactccagcctgggcgacagagtgagactctgtcttaaaaataaaggagttagacaaatctataaggttcacttcacaattctaaagtttgaagagtggaaaatatttgagtagaaaatatctggggggattatgtagacagcagccagtcttgtgatactataataagccaacaatcaaatgccttcttaaacttactattgtttttccatagctacactgaaaattttactattccaggatcactccattaccccaaaactttccagcctcatttaactttccactgcaactcctccatttcatctatttttttttccttaaagactgagtctcactctgtcacccaggctggagcacagtgtcacaatcttggctcactgcaacctccgcctcgcaggttcaagtgactctcctgcctcagtctcctgagtagctgggattacaggcatgcatcaccatgcccagctaatttctttgtgttttagtagagatggggtttcaccatgttggccaagctggtctcgaactcctgacctcaagtgatctgcccgccttggcctcccaaagtgctgggattacaggtgtgatccaccgcacctggcctccatttcatgtttaataaaaaaaaatttttttttttttaagacagtctcactctgttgcccaagctggagtacagtggcacactcttggctcactgcaacctctacctcctgggttcaagcaattctcctgcctcagtcagcctcctgaatagctgggactacaggcacgtgccaccatgcctggctaatttttgtatttttagtagagacagggtttcactatattggccaggctggtcttgaattcctgacctcgtgatctgcccgcctcagcctcccaaagtgctgggattacaggtgtgagccaccgcacccagccaataaacttcttcctatatttttctaggcaatccctaaaaaagactgggctgcaaagcttagctctccaataagagataatagctagacacttgtgtgacttttggcaagcagagcctgagtctcagcagcctcctctgcaaaatgaaaatattatcaccacctttttttttttttttttaagacaggttctagctctatggctcaggctggagattagagtgcagtcacacaatcatagctcacttgcagcctcaaactcctgggctcaagcaatcctcctgccttaacctcccaagtagctagggctacaggcataagccatcacaccacacctaccccatccccctttttaggactggcatacagaccaaaagagacaacaaatggaagatattttgtaaactttaaatcactatgcagaacgctcaagggttcagaaaataaagaaattagtcttccttttatttccaaattagacattttgggggtgtttgtttgtgagacagggtctcactcactctgttgccccagctggagtacagtggcgtgatctcagctcactgcaacctctgcctcccaggttcaagcgattctcctatctcagcctcctgagtagctgggattacaggagcccactaccaagcccggctaatttaaatttggcatttttgaaagtaaataccttaaaatgaaagatactctaaaacagaatctgtgataatttccaaatgttttacatacaatttgatggtaatgaaacaaccccatttacagatggagaaaattattatctatgatcaataatcaaagtattacaggctgggtatggtggctcacgcctataatcccagcactttgggaggctgaggcaggatgacagcttgagccctggagttccagaccaatctaggcaacatagggagaccctgtctctatgaaaaaaatttaaaaattggccagacatggtggcaaatgcctatattcccagctacagctacacaggatgctgaggtgggaggatcacgtgagccaaaaaaaaaaaaaaggggggggggggaagaaggaggaagaagaagaaggaagaagaagaggaagaggaagaagaagaggaagaggaagaagaagaagaagaagaagaaacaaaccactatcactatatacccttttgctcacttaagaagcttcctggacactccactctcttgcctaagtatcctactaacccagtgtcattttaataaggcaaactaacctaggtccaaaagtctatgaatactaagataggaaacaatgtaaattaggctaaggctaagactataaaaaaaaaaaaataaacagcactatactactttagtgtaaccaatacattttggataaatttaaaaaaaaaaactgtccaccctatttactataatgaaggtaattttcttagaagcctgttattcatatggtccaaaagaatgtttttctagccctgatccattctatttgcattaaaaaatggggcaaggggatatttaaaatatcatttcctgggctaggcgtggtggctcacgcctgtaatcccagcactttgggaggttgaggcgggtggatgaccttaggttaggagttcgagactagcctggccaacatggtgaaaccctgtctctgctaaaaaatacaaaaattagccaggcgtgatggcacatgcctgtaatcccagctacttgggaggctgaggcagaagaatcacttgaacccgggaggcagaggttgcagtgagccgagatcgcaccactgcactccagcctgggcaacaatagcgaaactgtctccaaaaaataaataaataaaataaaatatcatttcctgaaccctaccccagacctgctgatttatgctggtcagaatcgacattaaattttttgcttgttttctttttcagtagatacaaactcttgctatgtggcccaggctggtcttgaactctgaactcaagccatcctcccacctcagcctcccaaagtgctggggttacaggcgtgagcccctgcactcagcctcagaatctactttttttttttttttttcctgagacagagtttcactcttgttgcccaggctggagtgcaatggcgtgatcttggctcaccgcaacctccgcctcccaggttcaagcaattctcctgcctcagcctcccgagtagctgggattacaggcatgcaccacaacgcccggctaattttgtatttttagtagagacggggtttctccatgttgaggctggtcttgaacccctgacctcaggtgatccgcccgcctcagcctcccagagtgctgggattacaggcgtgagccactgcacccggcctgaatctacatttttaacaagaacccaaggtgattctgctgaaagccataagactaataatggaaaaagcactggggtagaagtaagaagacttgtttagtaaaggtagctcctatccttagcagtttcacctcagataaacatttaagtttctcaatcttttaagtggcattatgtcttattctatatactggagagagaaatatataggtatataaaacatatagccatatttaattcctgacacccccaaatcttgtaaaaatatggctatatggagggtatagcaaggtcacagtgcttactagttgcagagttagaattgaacccaggtgaaatttcagatgagctcacaaagtagtaacttgcggttcaaatacagcctggtatgttttgtttaatttcattattttagacttcaagccaacatttatcaattagaacatttcacagaaaaggaatctgaattcctggctgcttttaacaattttagaagatccagcaacactgagattataatcttaggtggcaacaattaccttctctaaacacagcaaaactcacaccacttgctattgtctcacactcactcaatttcaacaacgtatgctatcatcgggccccaactcctacttcaggtctacattctttgctccctccttttgaaccaaatgggatttacaagaaaaccaagtgggatttctatctactggtttgggaagatttagtgagaaaggaaatactggatttaaaactaataaactacatttgaaatactacataaaaatatattacactttgttctcttttccgagtgttttaagtgccattgttttgaattttggtggtaaattttaaatgaacttttgaaagattttaataaaatatgtttattataaaacactttttactttatgttcttatcattttcagatttcattccactttaaaataccaacgcttctcatggaagaataaagagattccactaactcacagacacctgtactccatgtatctatcagcaagtatagatgcacagatagaaaatagttggttgcttctttattctcacaatctgagacttttcacttgttaattattataaaaaatttgaaattataacttaaattgctcaattctctattaagcttccactgtacctttaacttcacaattaaaacaatcattatactgtattaaatttgttacattatttgtttccctattagaaataaacctctggagggcagaggttctatcttattcactcttaaagacttagtacagatctggcacattctttttctctttttctttggagacagagtcttactctgtcacccaggcggctcactgtaacctccgcctcctgagttcaagctattctcatgcctcagccttccaagtagctgggattacaggcgtgcaccaacatgcctggctaatttttgtatattttggtagagagggtttcgccatgttggccaggctggtcttgaactcctagcctcaagtgatccacctgcctcgtcctcccatagagctgtgattacagtcgtgagccaccacacccaacccagatctggcaccttttaagcatgcaataaacatatgcagaatacaaaacaagaaaaacagcaacagagaatacataaatgcacagtaattactatcctttaggaatttacagtctactgaattaggtaaaagagacacatcaacaaaaattatacaagattgaatatttaaaatgccacaggagagaaacagaaagtagaagtcagggaggaaattatagtatgagacataagttacagtattttctttttccctggacaccaatttccatccctaaatatttggcaaaagttcttaccactcaactttagccttaagtttctagtgaatttatactcatcatgaagaatatatatgaccacttcaagtgccctacgagaatatatcacattcagaattatctccactttttctggcctgaataactactgtatatttcaattcggtggcactggtatttctcaccaccatcatatctctccaggatagggaagtaagctagcacctacagtttaggtacattacagcatattggttaaaagcataggttttggcaccaagattctaccacttatctgctgtaagatcttgggcaggctgggcgtggtggcttaagcctgtaatcccagcactttgggaggccgattcgggcggattgcccgaggtcaggagtttgagaccagtctggccaacatagtgaaaccccgtctctaataaaaatacaggaaaattagtcaggtgtggtggcatgcacctataatctcagctagttgggaggctgaggcaggggaattgcttgaaccagggaggtggaggttgcagtgagccgagactgcaccactgcactccagcctgggtgacagagcaacactccgtctcaaaaaaaaaaaaaaaaagaaaaaaaaaaaaaggaaaaaagatcttgggcaaagatcttttggtaaaatgctctttgggtaaaatgggagtatctacctcaaagaggatttaagttagaaaatccatgtccaagcactcagtaaacacttaataaatgatggctattataaaagattaacactaaatctagtgaataggggcttgctagtcaaacatgtgcataaactgactatatattgtcttcatagttgacctgttttatcagccttcatagttattccttcctttccatttccactattactctttcaagtccttatctatactcatacccagacaactttctaaatggttttccatctccatcctcagacattctttgagcagactattattttatttccatcaccaatgcctggctgggataatgaaaagagatttcgatggcaaatcaaagaatttgggtttgggtttcagccctatcattaaaacattttggaaccctaaaaataaatttctcaactgtatagtgagttttaacttatcttcaatatctttttttttttttctgagatagggtcttactttgtcactcaggctggagtgcagtggcatgatctcagctcactgcaacctcgtcgaccttctgggctcatgcgattctcccacctcattctcccaggtggctgggactacaggcacatgccatcacgcccagctaattttttctttgcattttaagtagagatggggttttgccatgttgcccaggctggtctcgaactcctgagctcaagcatccacccacattggcctgccaaagtgcaaggattacaggcgtgagccaccacacccggccttcagtatctcttctggctgtaagtctatacctctgctctgatcaaggtgtctttggcttacaaaatacaattccagattggaggagcattaaggccttccacattcagtgtggcatgagctttggaggcagaaggactgagatctgaatcctgattctatagtttactggttgcttacccttgggcaacatattggacttctctaagactcagtttcttccacaaaatgggacaacagtaattctctcaggggcttattataagatttaaatgagatatttgttaagtgcttagcatatatgagatttgtgcctatattaatatttcccatttctcccttctagttgtaggtaggtaggtaggtaggggtgtgtgtgtgtgtgtgtgtgtgtgtgtgtgcaggcgcgcgttttgagacatgctctcactgtcatccaggctggagtacactcgcaatgacacggcaccctgcagcctcaacttcatggcctctcgtgatcctcccacctaaaccaccaagtagctgggactaagggtgcacatcaccatgccaggctaattttttattttttattttttggtagagacagggtctcactatgttgcccaggctggtctcaaactcctgagttcaagagatgtttcgacctcagcctcccaaagtgttggggattacaggcatgagccatcgtgcccagcctagttacagtttttaaactattcctggagacctagaactctgcttcaatcaaaacaactgctgggttgccccctctttcatatactgaagtttaacctcaaaaaaaaaaaattgaggtggtttcttctgttaaaaaacgcataaaatccactacaccatggacataatctgctccaattagccacacctactctttgtcaactgcaattaccttgtatacatcagtatctcctatctttggtaatatctattcctccctcctcaggacttagtgaagtcacccctagttattcttcttttgaacacttacagcattttattattatttagagaaaaggtcttgctctgttgcccaggttggagtgcagtggcacaatcatagctgtaaccttcaaatcctagattcaaacaatcctcccacctcagcctcccaagtagctaggaatataagtgtgcactaccttgcctaatttttagaaggggtctcactatgtcgcccaggctggacttgaactcccaggctcaactgatccctctgccttaaacttttgagtagctaggactacaggcacatgccactggaactgcaacttcttttctgattgttattttgccatgacttaactcacatttaaggtcttttcatttatcctttaaatgtgatgatctccgtactgagaaacaagtagtccctttctatacagcatgcaagtttatcattctcattcagtctcctctcctgcaatccctttcatctttatatttattttaatttttgtagagacagggtatgttccccaggctagtcttgaactcctggcctcaagcaatcctcctgctttggtctcccacagtgctgggactgcaggggtgagccaccacatccggtcctttccttttctgttttatccctaaaacctaacctcttaccttagactgccaattctgactaatcttgtttattacctgggcctcttctctatagtttatatttattccattaaaaaggtcaaaggctctacaagctctatattttattttattaaatgtggattgtgaataactaaaattatggttgcctttggcaactgtatgaagactccaagacccatttaattagcaggaaacagagattatagctacatgcttcttcaaatacaccagctctgtgtataactaagcttttctgacaatccataccttgatttgtgatttgggggagctacatatttgctattcccccaccaacctattcctattttcagtatcagcttttcctaagaagggaaaaggtataaatattgatttcaaagttaggcttatatttgaatggcagaccctcggtagctgtatcatctttccaaaactttccatttataaaatgagtggccgggcatggtggctcacgcctgtaatcccagcactgtgggaggccgaggtgggcagatcacctgagttcgggagttcgagaccagcctgaccaacatggagaaaccccatctctactaaaaatacaagattagccaggcgtggtggcacatgcctgtaatcccagctactcgggaggctgaggcaggagaatcgcttgaaccaggaggtagaggttgcggtgagccgagatcgcgtcattgcactacagcctgggcaacaagagtgaaactctatctcaaaaaaaaaaaattaaaaaaaataaaattaaatgagcatattaatatctatttcattaaatgagaccatgcaaaacatccagactctagatcaatatttggcacataataaatattaagcattatttcctttttataaaggaaaacatgaattgaaaagggaaagtaagatagaaagacaacttagcttctgtaaagacttcagaaaaatgtatctatgtcactataatattaatgaaaatattttctcaaaaaatgatttttcttgacagagtttcgctcttgtcacccaggctggagtgcattggcatgaactcagctcactgcaacctccgcctcctgggttcaagcaattctcctgcctcagcctcccgagtagctgggattacaggcactcgccaccatgccccgctaattttgtatttttagtagaggtggggtttcgccatgttagccaggctagtctcgaactcctgaacttaggtgatccacctgcctcggcctcccaaagtgctgggattacaggcgtgagccatagcgcccagacaaaaaatgatttttcttaagaaatcagtaaaatatttatagtgattgattgagacaggtcttgcttatttatttatagagacaggtctagctatgttgcccaggctaaggtgcaggaagtgcagtggcacatcacagctcactataacctccaacactaggtagggctcaagcgattctctcgcctcagcctcccaagtagctaggactacaggcgtgtgccatcacacctggttaatttttctatttctgttaagatgaggtcttgttatattgtctaggttggtctcaaattcctggcctcaagctaccctcctgcctcagcctcccaaagtgttgggattataggcatgagccaccacaccaggccagaagtgagtgcaatattaattcatattctaatttaacaataaagcctaaattgtaacattacatgtttctattctattcttttgaattcaaatctagttttcagcctgtaatcctagcactttgtaagcacaaggtgggaagactgcatgaggccaggagtttgagaccagcctgtacaacatagaaagacctcatctccaatggaaaaaaaaaaagtctaattttcctttagtcataaaatgtagtctaaacatatttgagacttatgtaatgcaggccttaccctacattgtattcaccatttatttcctaactgaaacaagactgggaaggaggtatacataaataaaaccaaagaaatacccccaactctactctgttttcattctgccttctttaggtcttttctcaaacaattatattttttgaatagtaatacaagtacagaacaattttttttttttgagacacagtctcgctctgttgcccaggatggagtgcagtggcgcaatctcggctcactacaacctctactgctgggttcaagtgattctcctgtctcagcctcctgagtagctgggattacaggcacgcaccaccacacccagctaatttttatatttttagtagagaaggggtttcaccatgttggccaggctggtcttgaactcctgacctcaggtgatctgcccgcctcggcctcccaaagtgctgggattacaggtgtgacccactgcaactggcccaaattttaaaaatatagtaaaatgcaactcagtttcccttcagagagtctatctttaacaaaaattttatctttatggtcaagtaaatacaaacataaatatacaggcacactcctgtatgcccacagaatgtaccattttaatatttcacaataatgcctcagttttactatacaagctacagagaatgttcatctctctcaacatattttttggctaatgattttataaagtaaaatttttacatttatttatttcaatcccaaaacttaatacaatgttcttaaaacgatgtgtgagatgtctggagatacactccaaataaaacaagcaaaactttgaaaaagctgcttcagtatcaacaaacggaatgtacatgttattacataggaagcaactgtgtgttaacaatcatattaattatttagtaaccaggaagatgtgcttaagaattttatatcctaaaaattttgttaattgcatgaaaaggccaggcatggtggatcacacctataatcccagcactgtgggagtccaaggtgggaggatcacatgagcccaggagttcgagaccagcctggaagactagtgagacctagtctctacaagaaatttcttaaaaattagtcaggcgttcgccgggcgcagtggctcatgcctgtaatcccagcactttgggaggccgaggtgggcagatcacgaggtcaggagatggagaccatcctggctaacacgctaaaaccccgtctctactaaaaaaaaatacaaaaaattagccagacacggtggcaggcgcctgaagtcccagctactcaggaggctgaggcaggagaatggcgtgaacccgggaggtggagcttgcagtgagccgagattgtgccactgcactccagccagcctgggcgatggagcgagactccatttcaaaaaaaaaaaaaaaaattaggcatggtggcatgcgcctgtagtccccactactcatgggtctaaggcaggaggatcacttgagcccaggagatcaaggctgcagtgagctatgattatgccactgtactccagcctgggcaacaaagcaagactctgtctcaaaggaaaaaaaaaaaaaaaaaagctggattcaagaacacatccattttaatttttaagtaatccaagttgttccctgtaatgttttcactagttgatattctcatggctatgatgtaagtacctattttcccataatcttaccaggctaactttggtctttctcaagctgataaatacctgaaggaaacttgttctttgcctataatgagatattacagatattttccccagtctgtttgttgactttgtttatgatgaaatatagccaaacttatcctttcctttttttgagacaggcttgctctgttgcccaggctggagtacagtggcacaatcacagctcactgcaacttcgaactcctggagtcaagggatcctcctgcctcagccttccaaatagctaggaatacagatgcacgccaccatgcctggctaatctattttttaaaattttttaggaactgggtcttgttgttgcccaagctggtcttgaacccttggcctcaagtgatcttcccaccttggcctcccaaagtcctgggattacaggtgcttaagtcactgtgcctggccttaaccttttctcaagggcttctaagttttgggttatgctcagaaaagcttttcttactcaaatattattttaagataataattctaccattgttcatcctaataatttcatgatttcattttttacatttaaacctctcattcacctggaatctatgtggggtaaggaatgacaatggggacccaacttttaaaattctgggttgttattcagttgttccaatgccacgactgagtgactgatgctctttctagatgttagatttttcagaagttagactcaggagtagagatgactagtgagctcagaattagtgaaacagacaccaaaattagggatttaggggctctaaaacacatctaacatcaaaagcacagatcctgaagtccaacatctatcacatataaagcaatattaactattactgttgttaatcttggaagccctaaggatggattatctctaattcagttaaaagaactatgtactatacaataggtgttaataataagcatatatggcatttttatagtctgtataatgcaagttcacttactttgttttcataactactctttaagaagacaggcagagattttaatatccatttattgctgaggaaaataattcagtaatggtaccttgtcccttcacttataggaaatggtagtgccaaaatcaaacccagatcttttatttccaaatgttaacaaactgccattacaccctgcaccaagtacttttacacaaaaattagtgagacttcctactcacaagggggttgaaacaattttttaattaaatattcagactgatcacatacttaatttaagtatgaaaggagtgcacaaaagtagaaaacatcatccttggcttcaaggaaacttcaaaggtctacagcagttaaaaaaaaaagcaagacttgagggactgggaaataaacctgaaagtcaggaaccatgtcttatctactctccatgtcttagggtatttactgctggtataacaagaatgtagtgttaggtcagtaaatatgtgttggttgtctaaatgtactcatcgaaccttctaaacagggtgagataggaaataatatcagaccccattcatttttcctaggagctaaacttttgtctgtcaccaaagaatcagccaaatcatcaaatagtacttacacaatgtaacaaagaaacttcaggcaccatttctgggctacacctattgactaaatgtatttcacagaaaaataaaaattttgaactacattccatttcaaagctgacaaaaggttataaaacaatttccagaactgaatccagtctaaatgctacaaaatacaactatcattcactcttgctttattctgaattaaacatatcctctgtttctataataaacaattgttcataatatttctcatcagtagtgctttttttgtgttgtttccttcagatatcttgtcaacattatcttttcttcaggtcttttattttttaatactaataattatcggccatatataataacttttttaaaatttctgaaatattttaacaaatactaaaggagaatgaaatgtgaataagaaaatgggtacaaaaataaactcagtttacaaagtacaatttaatatcctgccacagataacttcattccagagtctgcatgccctattctccaatctattcagtaacaagacatcagcactggagcaccaagaactgcaacttttgttggcaaaagccttgcatgggtcaaaataatttttaaagctttgacaaaaaagcccaaaaggaccaggcttaaaattttagtggatggttgcatgtgagatatgttaagagtcctaaactcaaatcaaaaggaaagttgacaatgaactagtcaatgtgaagaacttacaaaagcataagcccagaaatcacatgcgatgcctactgtttacactagagtgacagggcttttttgaatggttatttatatcaaaggtttagtatggtcaaagaaatctgtcataaattgcctcaatatgcaataaatgtggatatattctaggttaaattatgtgggtactatagaaagaggtatgtgagagaaaccagcacaatgcctgcatgtacactgctgaatccgacactaggaagtaaacagtcagttatgaaacaaactcaattcttaatgttggaaacagaataaggctccattctttttggagaataaagatactaatcatttaaaacagatggactttgcaccaacaatgtaaatatacttcacatacacaactgtacacttaaaaatgattaagatgctaaattttatgttatgtgttttggaaagggtgaattttattttatttatttatttattttaaacagagggtcttgctctgtcacccaggctggagtgcaatggcccaatcatagttcactgcatccttcaaatcctgggctcaagtgatcctcccacctcagcctccctagtagctgggactataggtgtgtgccaccaagtccagccaattaattttttttttttgtagagatgggggtcttgctatattgcccaggctggtctcaactcctggcctcaagtaatccttctgcctcagcttcccaaagtgctgggatttcaggcgctagccactgcacccggctatgttatccgttttttaacaattaaaaagaaaaaaaaccttcaaatgagctttaaatttcccttgaatttttaaatgaatagatttatgagttattgagtacttactatatatacttgttaccatggagatggaggcaaaatatggataaaacctaactcctcttttcaagaagctcaaagtttaaagggaaccaaaattctaaactgtttttttttcgtgtgtgtgtgagacagagtctcactctgtcacccaggctagagcgtagtggtgcgatcaagggtcactgcagcctcaaccttccgggctcaggcaatcctcctaccttaaacctcttaactgggaccacaggcatggactaccaagcccaactaatttttggggggtggggtgtagggggagatagagatggggtctatgttgcctaggctggtctcaaactcctgggctcaggtgatcctcctgcctcaacctcccaaagtgctgaggttacaggcataagccacagcaccctgcctaaaatctccttaaaaacaaaaattgaaaataactttggatcatccaaagtaggtgagtagccatttacctatcctttcttaaacacattatctatctcttctccctcctttctctctgcaggttctagttgtactttaaagtctctgatgcttaacataaaaaattctgggattcaaacagatttgctagccactatgaaccagccccaccttgtgtgcctgaacaaagagaataacaatcaacaatgttcctgggtgtcctcgaatagaagaggtatttcaaattggagagaaaagcaaatctagtcttctgaccttcttctaaaacaatcacctccattcaagtcaacccaacacttaaaactatgcaaaccactgggacaaattctatcaaaaagccatctccatttcagtcctgattatcttctctcttctgggctcttacaaaatctgtggtctatcccatacgaattgctcttaatcagagtattctttgtattgtttgtaaagagttcttgtgccactggaaaacaagtttaaaggtaattaaatcttctatttccccagaagaataggttaatgcttagtaatgaatatttcattaaaacatatttattgagcatctcccatgtgtcaccagtcaatagaatttgtagaagtagaattttaaaattaaaggttttaataactgaaacatcctggccaggcgcggtggctcacacctataatcccagcacttttggaggccgaggcgggcggatcacgagatcaggagatcgagaccatcctggctaacacggtgaaaccccgtctctataaaaatacaaataattagctgggcgtggtggcaggcgcctgtagtcccagctacttgggaggctgaggcaggagaatggcgtgaacccgggaggtggagctggcaatgagccgagatcgcgccgctgcactctagcctgggcgacagagcgagactccacttcaaaatataaataaataaataaataaataaataaataaataactgaaacatcctatttcaagccctgtcctcctggtttctctctttttaattaattaattaattttttcttttttaaaagatcaagacagggtcttgctatctcacccaggctggttttgaacacgtggcctcaaacagtcctcctgcctcaacctcccaaactgctgggattacagacatgagccactgcacctgtccttgtgttcctctcaacacacttgaattgatcagactttggcattcaaactgaaaatccatttcctgaattcaaagaattagtcaacagtagcacacttctccccaaagatgcctattatacaataagctcccgcatgaccagatgtagaggcacaacgattcccgtaatttttttcttttcttttgagacggagtctcactctgttgcccaggctggagtacaggtgcacgatcttggctcactgcaacctccgccttccaggttcaaacaattctctgcctcaggctcccaagctgggactacaggcatgtgccaccacgcctggctaatttatgtatttttagtagagatggggtttcaccagttggccaggctggtcttgaattcctgacctcatgatccacctgcctcggcctcccaaagtgctgggattacaggcgtgagccaccgcgcccggccaattcccataatttctgaggtagcattcatatcacatctgcaaagaacaaacagtagctcttgaatctgagaaagctaaaaagagaacgcagttggttggtttccaactagggagaactcagaagctgaaatattagtattttgtttttaatacaaatgactggtataaacagagtaacaaatgcaatggaaactttaagccatacattttccagaccttgataggaacctgagaaataacctctctgctcagagagccctcaaaaacctctgctttcattttatgtttcatggaggttaatttttcttctctaccactacataaatttcttattgcagagcaaaagagccagggcaatcaccagcttcagggagaatttaaaagaataaaaattaaattctgctactgaatgattctctttataatactgaagccagaatacattactaaatagcacaaagaaagcatactctgatattttgcattccttttactccactcacccatcacctccaccaaaaaaaaaatttaaaacaggctgagccacacacagtatgtttgacttgaaagtttcgatgacacagcagcttactcttgcaaattactggcaaatatagaggcttaacagtgacttaaaatacagttataggacaaacagactactctaaggggaaaaaggtagtagggagaaacccaagtacttttttaaaaacacaacaaatacattcaggtacaagatctgcatcagaaatggttttcttcctttttctctggtaaatgtaaacacttaccctgaagagattttcccaatccctggcccagcttccacccatgtttctggagtaagcggtgtccaatattatcctgacagacagaacagagagacaaaccaaaaatattccaataatatattcttcccttcctagagacatttaaacagatgatgagcaagagatacttctacatatatgcatgcaaaaaggtgctaataatagggtaaatgtgcccaataagagggacattaatgtaaaaagaaaagctggctagtattttacatgggaagaacatatggggtaagggtcctttctgatggtgtgttgggcaacttttgtatataacatttttaaatggagtaaaaggggaaagggaaaaggggaagaatacatttatgaagttttaaaataacactaaaaagcataaaatcaaggtacttatacagtcatatccaccacctaaacagcaccactttaagatttttttttttttaaagaaaatctacactgtgtttagttgttttgtttatgtgtcaggctttcatgatacaaagtaagttataagtgtaagactgccccaccactagaaatgaaaaaacaatcagagcaaaatccaggctagacttgattggtttaaaaaaataatatatataatataaatatttaactagcatgcagccaatattaaactgaaaaaacagtgaggttagtaaaacaagaaattaagttgattaaacagaaaaataaaatgagctcaagcacagactgagtgatgcatttcaacatgtagtctaacaaaaatgctaagatgttagaatgaaacaggcctagcaataagttaacagtaaagaaccattagtgcatgtaggggtagaaaccaacatacataatgtctcatcttcccaggagcacattcgaaaaggtatttcaatgtaaactgcatgaaaaaaatgctacaaacaacaattaaatgtcagctttcgtttaaggggtcaaggtattggaaacatctgcagccctttctttgtccaattctttgctttttacagttattgtgaagtaccaagacaaggctaaaataagcactaactgtatcagaaaaaatgatcatattcacccaatggacaacactgaaaaattctaaacacaaagtattctatatgtattaaaatgtaatttatagtattaatccagaaaagattaaaagtcacaatataagtaatgttagcagaaaacaaaggtaaatcatttgaaaatcccatatttcctgaaatcaatttataaagctgacgaaaccacaaatttctgcattaaaaccaaatattgcacattaaactgtctggcatctccatattcaatgataaagtgttctttgaactcatagaggaaagaaaaacatttttttactgttaccttccctaactagaagttagaagaagattaagcctcccgaatgctctgtttgtttgtttgtttaaggaccattttcttctgtaagtttatgacagcatgcaacctggaaaactgggctaaacagctaattatttcattgatgggggaaaaccaggacttttttttttctgatacagcatcttgctctgctgcccaggctggtgtacagtggtgcaattatagctaactgcagccttgacctcctgggctcaagcaatcctcccacctcagcctgggaggtatgggcgcacaacactatgcctggataatttttttattttttgtagagatgaggtttcactatgttgcccacgatgatctagaactcctgggctcaagcaatcctccctcctcagcctctcaaagtactgggattacaggcatgaacccaggatacttttctaaaagcaaaaactggaggcaaattataacgaaaaatttgtttctaaaacaaaacatattgtttcaaatatacatataaaatcattatggtgcacaaaagtgtgctgcaagttatttttgctctataccatttgaaagaattagaaacactactgatcccaagcactgacttccacattactacacatcacaaaaatataatataacactactggctgctggggcttcttcccttcccccctcctaactgaactgccaggaaaaacattcccttacccagtgttcagtgtctgactatttataactttattaccccctaaaacagaaaagattaaaagtctcaatataagtaatgttagcagaaaacaaaaaggtaaacaggcccttattttactactatgaaaacaaacttacctgtgcagaaaatccttatttcatatcataattcctacaactgaataattctaggaaggacaaggatagcagaatgactttaagagtatatggtttatcagataattgtttaatctcttaacagactcataactatatttggcaccaagatttaggcattaaacaatgctgacaaaaattgttgctccccccccctccattttgttgttgttgttgttgtttcttttttaaagaaaactcaatctttggctaagtggagatgagacattatgctgattgtgttatattatgaatgcactcaaataaacagacagatgaagcagtatgctatttccaaaagcagtgcaagtggagtgaaagcatttccatacgaacctggctttaaaaactgggctgtcaaaagaacagttaaatgtaacacaaagtaagaaactgtccaatcactaatggtcgtttttttttttgtcttgttttcaattcactgcttgcaagtaatgtatttattaaagagtgaaagcataagtaaattcacgagtcaagaccagctgagagattcaagagcagcgtgttgtgactgacaacagtgaaaggaaaagcaaatgttaaagggagagggagaaaaaaaagaaaaaattaaggttatacacattagcaccacttttacaaaaccactcaagaggatggctgtcaccttctcagaaaaaaatcattgatagaaaatggtagtggcatttctcttctaaaactttaggttaaaactgttctttaattaaatccactttctcagggactataataaaatatttaacttgccactctaagtccttccaatcataacaaaggcaatagaaacaatagacacatctcccagaatctctcctcccctcaccaacctcctagggtaaatgaatgaccaacacagaaaaactggacctttcctatcatttcaaactacctgcttttggaggaaaaaaggcagctctgtgactctgcaggaagggctagtattcagtatggtctcccttcctatcagtaaaagaaaaaaaggttttataaacactcgtcaaaaatccaataggcttaaggatgacggctaacacaaggaggcacaccaaaataatttataacaaagtaaaacaaaccagacttgtctacctctgaaatgatcaaaactatctctgtgaaagaacaagaaactcaataaccagtctttgggaaacaagcaatctattctctctgttaacgactgtaatttttgcaaattattccaattattccaggattttttttttttttttgagacggagtctcactctgtagctcaggctggagtgtaacggcaatctcagctcactacaatctccacctcctgagtagctgggactacagacacgcaccaccacatccagccaattttttttttgtatttttagtagagacagggtttcaccacgttggccaggctggtctcaaactcctgacctcaagtgatccgcctgccttggcttccccaagtgttgagattacaggcataagccaccacgactggtccatggatgctatttacaacaccaagttggcacaagtagcttacggctcaaacaggtaatctagacagaacaagggcaatgaacattaaatttctttgttccttttttttttttttttttttttttttttttgtgagacagggtctcgctctgccacccaggctggggtgcagtagcacagtcacagctcaccgcatccttgacctgcaaggctcaagtgatcctcccatctcagcctcccaaagtgctgggattacaggtgtgagccaccatgcccagccaatttatttccaaagtagtaattatttttaaaaataattttaaaaaaaagtaactctacttaatttcagttactataataatgactaaaaatcttttggtttttgttttttaaatatataatttggggtttaattataatctcatagaaccaaaaataaattacagaaatttttttcattttaaaaactctggttaacaacaaagatacatgatagaggtaggctgcttataatttttttcttctaaagtcaacttgatataatttaaatgtacatttaagaactgcaaagaaatcctaactttaataaataaggcaaagcttatttattatgtagaaaagctggttttctacataattcagagttctcacaaaccacctatttgttttctctctctgctcaagaccccaaaatggtggctgtgcggcctgttctttggttggaaatgaagttcttcttctaattctggttaaaccatgtagctaaactgaaaacaaactttttcacctagattacctcagttggcctttttttctccccctatttctacacataaatatatcattaaaatgctaatttttatcatttgttcttctctaataaacacgtgagaaaaggaatataatttttaagcgggaagatctttgacaacaagaagtctgtattataaactaccaatatgctgaaaacacaataccagcaatgtaaaaatacttcattattaactgtttcagccattcctcaacattttattaattaaataccaagtagaaactttctgctccatgaagctgtatgccaccatagtaacaatgatcattttggtaacagcaccaccaatacacatgtatgacgggagcctgccaaaacacaggaaaaaatttactttattgtatgaagctggctgtaagtttttacagtaggaaacggcctattatgtctcaagagaaaaccatgctacaggtatgtccatgactggatgaatactaattctatactgaattttgttttagttgacagccacattcaatttacatcatttagcccattttcaacagtgacaaaatagtaagtctcttgagtggattgtaagctttgctgattgtgtattaaagactataagcaagaaccaatgctactaggtgaacccatgcaaacaagttgtaaaaattcccgaaacaaaaaaactctatagctcactacagatgacacaatgaagactagagagaaaagccatatagtaatgctacaccattcagctccaagaagcacattatttctagtgcagtccacatatggtcactgctaaatgtcaaatcagcagtcttataaagaattacagtttggaactagtggagtccacagatctagacagatatgcaacatcacaaaacccaattatacatatacttccaaatccttaagatgcgcaaactaaacatcagcaactggagtttgaagcttacactacatttttaaacctattaggtcatcctgacaaccataaagaaagaattttaatcagtcaggtagagcaaggaccgactagcggctgatgggtagttgcacttccaaccacaacagtaacaacatgttttaagtctatgatgcatgcattctgccttctatatagcttaaagtcattctcccatctgatccctcatctttttttgtttgtttgtttttggagatcgagtctcgctctgtcacccaggctggagtgcagtggcacgatcttgggttcaagcgattctcctgcctcagcctcctgagtagctgggactacaggcgtgtgccaccacacccggctaagttttgtatttttagtagacatggggtttcaccgtgttagccagaatggtctatctcctgaccctgtgatccacccacctcggcctcccaaagtgctgggattataggtgtgagccactgcacccagcgcttttttttttttttttttttgagacggagtctcgctctgtcacccaggctggagtacagtggcgtgatctcgactcactgcaacctctgcctcccaggttcaagcaatcctcctgcctcagcctcctgagtagctgggtaatcccagcacatgcacaggcatgtgccaccacgtctggctactttttgtatttttagtagagacagggtttcaccatgttggtcaggctgttctcgaactcctgacctcgtcatctgcccgcctcagcatcccaaagtgctgggattacaggcgtgagcccctgcgcccaattcctcatcttctaactatgataaaggtcataaaggaccgtgtatcctaaaaaacaccaattaattcttctgtgattgaatcctagacggagctatggctttagatcaagctttgttttgtaaatattttgtctttaagtaagtggaggttataattataacatttgagacctaaatatctcataaagcaataacaatttttaaaattcaaattcaaagcttctcgtaatagggataaaatgttcacacttttcaacttgtttttaatagagataatcaagttgtttagcaattctcatataattttcttaaaaagatatttcattcttgaggaaaaatctcattgaaagatatctggttggttgaagcaaataagggaaaattaaacttcaaaaaatattattaaatgctttacaaatactggattttgatatattttcaacatttacctaataaaattgaaataccaatatctcactaacaaatctaagcttcggaagttcactaaaagcataatacattattgcatcttcatgtctcatttcccatcttgctggtttgcatcaaatttagcctactacaaaataaaaagaccttaatcctatactcacaataacccttcacacaggcatattcttggcacaaacctgtgcagagacctccacggttaccagctgctgcagattacctttggttaaaaaaaaatgactagacctttagctcctgcaatgatctgtagactcccaaagctgcatattttcagccacttttgagttgcatgctgtagcaaaacagtcagcacctctcaatagatattgctgcagagaaagattttaattcagcactctttctgtgttagaagtaacaccattttcccctaaaaacaaaacagcttaatatagccagccagccatgtaattaaatatttacttattatttagtgggcattcctcaggtgataagggacttcttttgtttggtgggagggagggaacactacctactttgatgccaatcactgtaggagtttctcttaaaacttaaaattttctgtgaccaaaaaaagtaaaaaaaaaaaaaaaaagttgaaaaaagagaaaaacacttaaaattttactcacaaatgatcaggcaacagaaataagatccctcttatcttgtgtgtcaatacttctttttttttttcttattttttcttgcatctttgtttattctcccagatcctgtgccctacttctacctaatacaatgtaggccatgaagttctctcctacaacctaaactatctcatcacaaataatgcatatatttatctttcagaagtaaattttcattagaagtgtaattactaatatacatttctgaacattcatttatttaaaaaaattaaatatccagcctgagtactatatactatttgctattttaagtgaagaaggtagcactacttaataaataaggcatattatcaattctactcccactgaatgagattattcaacaatgattactcaattagactgccttctgatactgttctcgctatatgtggcagaaaaagtcctggacattatgagaggtaaaatagcattagcctcatgtgccataggaatgaaatttccaaaaatatttcagtgtagccctctaggcttaaaatatgttaaatatcatttaatttagtggtttaaaaaatatttgttaagtatcgtaataatgaatactaggttgcaaatttcatctaaatttactgctactgttgagtatccacagaattatagcttgtgtaagacaattaaccaaccatgcaccttgtagaatgtggtactggggagctgattctgacagctctgtcttaaacttagaccctcctggttttttttgtttttgtttttttatttgtttgtttttgagatggagtctcgctctgtcacccaggctagagtgcagtggcacaatctcggctcactgcaatctccgcctcccaggttcaagccattctcctgcatcagcctcccgagtagctgggactacaggtgcctaccactgcgcccggctaatttttgtatttttagtagagacagggtttcaccatcttggccaggctggtctcgaactcctgacctcgtgatccacctgtctcggcctcccaaagtgctgggattacaggcttgagccaccgcacccggccagaccctccagttttgtaaattgaaatggaaaaattaaattagtttgcaaatacaagatactgtctagcctacagatttcattacaaaattctgccttgtcataatccccaaaataattcagaacaaggcacaaaccagtgatttttttttttttttttgagacagagtctcgctctgttgcccaggctggagtgcagaggcacgatcttggctcactgcaagctctgcctcccgggttcatgccattctcccgcctcagcctcccgagtagctgggactacaggcgcctgccaccatgcccggctaattttttacattttttgtagagatggggtttcaccgtgttagccaggatggtctcgatctcctgacctcgtgatccacccacctcggcctcccaaagtgctgggattacaggcgttgagccactgtgcccggcctaaaatcagtgatttttaacttagcaaagtgggcttggcattttatccttatgtcaaaacacaagactaggctttcagtgaaatatcagatgagaattctccctctgcagcattatcacatgcgtcatcaattactgccatgcctaagtctagcatcatgccagcacattaagacagaaggtactatatgcagtgttcactggaccagaaagacagaaataagaaagggaggtggggagaaagaaaccctagagaagaaattaaaaaaaggcagaccgtgcaatacaaaccagatcatggctgcttagctaatatgggccaactgctgtggaagaaaaatgtcgaacaccccaagttgtgtaaatttctgtaaacatctaaacacacatacaaacacacacaacaccaacctaattaggaacataaatatatgttgatcctttactatgttgcagttttgaaaataaaagctaaagttaaaatatccgtattctctaaattgccttcttattttcctgaggaagaagctagtgtttcttaaggggaagtggggggcttgtcatgatggttataaagattaagattccctttttgactttttttccccactcaagttttaccaataactcaccgaaatccttattaaatatgtacacttaagcacaaatagtaactgctgacaataatgacaagtttagacattttaacaatagactgtgttatttaaaaataacgggtttttcaaagtgaaaataatgttcaaaaattaagaagtttttttaaaactaagagccaggtaaataaatctccttgttctattgcttgatatcatcagtgtccaaaactaagcagtgtgaaaagatagaaataatcagcttttgacaaaaaccacatttcttaagctacagagaccaaacttgccatgtttcacaacagtctggtaaataaaacatattactccttaaatgtttttaatataacatttaaaaaaaaatttccatacatattctacttatgtaggaacatttcatacataattatattgcccaagaaaggtgaagctataaaggatcaaaatacattttactcctttattcaattcacaaaatgctaaactttaacttgctaccttcaacaaagtatcggtatgggccaaaaagatatttttccattgaaattctaatgtgtttctagatttttttggactgatttcccaacatattaaatattagattacatcccaagctttaattgattactgtatggcatgcaagaaaacaactctaaactgtactattggttattaataagtttaacttcactcacatcaagtgtcacacgaacactacctaactaactagctaagacccgaaattaagcactgattatcttaccgattctataggcttgtcaagtgacgcttgttcaatttccaagtgtccttcctcatactgatcaaagtgattaccctgaaaaaagatgattacagttatttttcaaaagcagttaagtgtcaaatctattaacagcttaaccaaactaaggattatttttaacttttcttttttttttttaacctaaaaggacactgcaatcgttcattttcagtacacaatcaaaaccacaccacaaattccaactttttaaaaatttataaaaatgggtcaggcgtggtggctcacgcctgtaatcccagcacttcaggaggctgaggcaggtggatcacctgaggtcaggaattcgagaccagcctggccaaaataatgaaactccatctccactaaaattacaaaaaattagctggctgtggtggtgtgcacctgtagtcccagctactcaggaggctgaggcaggagaactgcttgaacccgggaggtgggggttgcagtgagttgagactgggccaccacactccagcctgggcaacagaacgagactccatctcaaaaaagaaaaaaaaaaaaagaaaaaactttataaaaggccgggcgcggtggctcacgcctgtaatcctagcactttgggaggccgaggcaggtggatcacgaggccaggagatttagaccatcctgacacggtgaaaccccatctctactaaaaatacaaaaaattagctgggcgtggtggcaggtgcctgtagtcccagctacttgggaggctgaggcaggagaatggcgtgaacccgggaggcggagcttgcagtgagccgagatcgcaccactgcatttcagcctgggagacagagcgagactccatctcaaaaacaaacaaacaaacaaacaaacaaaaactttataaaaatgtattagagctgggcacagtggctcacacctgtaatcccagcactttgggaggctgaggcgggaagatcacttgaggacaagagtttaagaccagcctgggcaatacagtgagaccctgtttctacaaaaaaaaattttttaattagccacacattgtggtgtgagcctgtagtcccagctacttagggggctgtgatgggaggatcacttaggccaaggaggtcgaagctgcagtgagctgtgatcaagccactgcactccaagcctgggggacagaacgagatcctatttcaaacaaaacaaaacacaacttattaggaatctaggcctagtaatctgaacttttagtctcctaacaagtgttgaaattgtaaactaaaacactatcaaccatttgggacaccaactcttttagactgactacattaggaagactacagagtcttacaaacaaagagccacgctgttttaccttttttttttttgagacaaagtctcactctgtagcccaagctggagtgcagtgtcacaatctcagctcaccgcaacctctgcctcccaggctcaagtggtattcgtgcctcagcctcccaagtagctgggactacaggtgtgtgccaccatgcctggctaattttttgtattttagtagagtcagggtttcaccatgttgcccagggtagtctcaaactcctgagctcaggcaatccgcccacctcagcctcccaaagtgctgggattacaggcgtgagccaccgcacccagcctgttttacttttttatatgcaatattgcattaaatctttaataatgaagaaaacaagtcatagtaatgaaaataaaacctatttttaaataaatactgctcaatctggtaacattattttaaactaaatctgctaagacattaaactttaaatcaactgatacctcccggcttttcaagaaattaaaaataagctcttgacagtttccaaagcaactattcctcaagatgatctgcaaaggagataaacatgctttataatgatgtatttgatcataatcaagcaagttgtcactgcaactaaaataagtaaaaacagtttcaacaaatgatagctgcagacaactaagaagttatctctaatcatagttttcacagatctccttgcttcatcaggaaggaatagctcataatttgcttttaaatcaaaatatcaattttctggttcccttcttgtcttaaaatatagggcatcaggatttgtgagtcccacaatgacctaaatcaaaagactaaagacttcagtcttttggtctagcctaaacgaattcagtgtgtggaaagatatgataacttgaatgttaacctaacaaaaagttactttgccttttcaaggtaaaattaaaattctaattcaataaataaaatctaatgatggggagctctaacatgtaatttgccaaattgtatagtaagtattacgtttctctcactagactgtgaagtccttgaggacaagaactgagtcttgtttatctcttacacctaataacatggcaaccaaacactagggaacaattaggtgctaaaattgtgtggcagtgatgaacaagttctagaacaagatggtggtggtggtagtcgtacaatattgttaatgtacttaatgctactgaactgtatccttttttttaagagaagggggtctcactatgttgcccaggctgccttcaaactcctgggctcaaggagcccagcctcagcctcttgaccagttggaactacaggcgccacaccagtacacttggcttggactatatactttaaaatagttaaagtgataaattttatgttacacatattttaccacaataaaaataataaaaataaaattgtatggcaaagtctatccaaataaagaaagggaaaaaaaagaagaaaaatggaatagcaagggacaggaggagtatgttttccaaagacaaaaaaaaaaaggacttaaaagtgggtatttcaggaatgaaaaaaagcagtcatgaacaaatgattttaaaaaattaaaaacagctattaatcctgaaagtctttttgttttgttttgtttgagatggagtcttggtctgtcgcccaggctagagcgcagtgatgccatctcagctcactgcaaacaaggcctcccagattcaagggattctcccgcctcagcctccggagtagctgggattacaggcacacgccaccacacctggctaatttttgtatttttagtagagatggggtggggggtgggggggttcacaccatgttggccaggctgatcttgaactcctgacctcaagtgatctgcccgcctcagcctcccaaagtgctgagattacagatgtgagccaccaagcgcagcctgaaagtctgtcttcaatttacctccaaacacctgcttcttggcattttaatttctactgcaacactcaacattttaagttactttaaaggtgttaattgcaaagtacttctaaattactaaataataaatatccaaatactgagattaactcaaacctcattatagtacagaacaccaatgtacagctgaatatcgattctttcactctacaggtctatacaatttaatgatacaggaataaaccaggcacagtggctcatgcctgtaattccagcacttcgggaggctgaagtgggagcactgctggaggccaggaagttggacatcaacttgggcaacatagcgagcaagaccttgtctatacaaaaaaaactagatgggcgtggtggtgtgtacctatagtcctagtcctatagtcctagctactagggaggctgaggcaggaggatcacttcagcccaggggttcaagactgctgtgagctgactgagctaccacattcaagactgggtaacaaaccaagagtctgtctcaaaaacaaaaaaaaacaaaaaacaaaacaaaaaaaccctcatcctaacaataactatgtactacttttttaaagtaattaaacctttagtttgtttagagacagagtctctctctgtcacccaagctagagtgcagtggaaccatcatagcttactgtaaccttaactcctgggctcaagtaatcctcccacctcagcctcccaagtagctagggcaacaggcatacaccatgacgcccggctgttttttattttgatttagatggtctcaaactcctgggctcaagtgatcctcctgcctctgcctctaaaagttctgggattacaggcctaagccatcaagcctggcctagagtacttaatttaggacaactatgtgatggttttaaacaaaaagagaattgccccaaaatatatcactatcaaagatgacatttaaagcacaaacacagattattagagaactaccaagtaagtctacaaaaaagaaaatgggcaccttctaggaaaaaccatttcagctcatccttgctgcatgaaaaatcacacaagtttttccaaaaagataatgaatcattagcaaaatcatcttttaatcttaggcttaaagttattttagaaaacccttctgtagattacaaactactgtcagcaaatgccaggttccaaataagacatttaacaaatttctaaatacagttagctaattaacttttcaaatcattctggatctgtcagatgcaatacaaatcaggattaataatatagacagttcaacagagaaattttaatgttttcaattaacggtgctagaactaggtgtccatatacaaaacaaaagagcttcaatccatactttgaataaaaaaagaacccaaaatgcactgcagacctaaatgtaaaactgaaaatgatatattctagaagaaaaaatacaagagaaaaatctttgtgaccacaggctaggcaaatattttcgtagagacaaccccaaagcacaatcaatatatggaataaaaaattgatggctgggcaaggtggctcacgcctgtaatcccagcactttgggaggtcgaggcgggtagatcacagggtcaggagttcgagaccagcctgaccaacatggtgaaaccctgtctctactaaaaatacaaaaattagccgggcatggtggtgcgtgcctgtaatcccagctacccaggaggctgaggctggagaactgcttgaacccaggaggcagaggttgcagtgagccgagactgcgccactgcactccagcttggcgacagagcaagactccgtctcaaaaaaaaaaaaaaattgataggctggactgggagaaaatatttacaaatcttattccttttcaaaaaaaaatcagaaaccaatgaatgctgaacaaatccatacctgattaaaaacctgtatccagaaaatacacaaaattctcaaaagaggggaaaaaaacaacccaatttttaaagtgggcataagatttaaacatttcatcaatgacatacaggtggcaagtaagcacatgaaaacacattcaacattattaaccattaaggaaatacaaactagaatcacaatgtattaccaccacatgcctattaaaatggcatttaaaaaaaaatgcggcagggcgcggtggctcatgcctgtaatcccagcaatctgggaggccgaggcaggagaatcacgaggtcaggaattcaagaccagcctggccaacatggtgaaactccgtctctactaaaaaatacaaaaattggccaggcgcggtggttcacgtctataatcccagcactttgggaggccaaggagggcagatcacctgaggtcgggagtacaagaccagcctgaccaacatggagaaacctcgtctctactaaaataaaaataaaaaattagccaggcgtggtggctcatgcttgtaatcccagctactcgggaggctgaggcaggagaatcgcttgaacccggaaggaggaggttgcagtgagctgagatcgcgccattgcactccagcctgggcaacaagggcaaaaaaaaaaaaaattagctgggtacgatgacaggcgcctgtaatcccagctactcaagaggctgaggcaggagaatcgcttgaacccgggcggcagaggttgcagtaagccgagatcacgccactgcactccaacctgggtgacagagtgagactccagtctcaaaaacaaaaacaaaaacaaaaaaaaacaacctaataccacttcatttgtttggagagacagtctctctcagttgtccaggctggaatgcagtggcaccatcatggctcactccagcctcaaccctccttggggcttaagcaatccttcccatttcaggctcccgagtagctgggactagaggtgcacgccactacaccaagctaatttttgtattgttggtagagatggggttttgccatattgcccagactggtctcgaactcttgggctcaatctgcccatcttagcctcccgaagtgctgggattacaggcgtgagccctcctctgataaaatttcagacgagcaactttcatagattactgatgggaacataaaatagtacactcaacttaaaacacctgtctgtgaatgtttttaacaactttatttgtacgctagaaactatccaaatgtcaactgagaaatgaactttaaaaactatggtataccccatacaatgagatattacttggcactaaaaagaaacaaattattcatacaagtagtaacagagatgaatctcaaattaattatgctaagtgaaaagaagccatactcaaaaggcttccatatataggacattctggaaaaaacaaagctaaagaaaagaaaaagatcagtgattgtcagaagctatacactggttgttgtggtggctgcactatgatgcgttttgtcaatactcaaattgtacttttttttcaccgtcttatggtgctgatgaactgtacatgtaaatgggcgaatttcactgtatcttaattgtacttaaattttttgaaaaatggtgaaaacaggctaaatatttctgtatttcacctctaaaaaatgtattttttgaatacttaaattaaaatcctgttccataggcagattgtagtggcagttataagaatctataaatgtgttaaaattcatagaactaggctgggcatggtggcttacacctgtaatcccagcactttgggagaccaaggcaggcagatcacttgaggtcaggaatttgagacctgactggccaacatggagaaaccccatctctgctaaaaatagaaaaattagccgggtgtggtagtacacgcctgatatccaggtcctcaggaagctgaggcaggagaatcgcttgaacctacaaggcagaggttgcagtgagccaaggtgtcgccactgcactccagcctgggcgacagagtgagactcttgtctcaaaaataaataaccccatgttctcactcttaagtgggagctgaacaatgagaacacatggacacagggaggggaacattatacactggggcctgtcagtgggtggggggcaaggggagggaaagcattacgacaaatacctaatgcgtacgggacttaaaacctagacgaggctgggcgcagtgggtcatgcctgtaataccagcactttgggaggccaagacaggtggatcttgaggtcaggagttcaagaccagcctggccaacatggtgaaaccccgtctctactaaaaacacaaaaaaattagccgggtgtggtggcgggcgcctgtaatctcagctactcagaaggttgaggcaggagaatcgcttgaatgcaggaggcggaggctgcagtgagccgagatcacaccactgcacttcagcctgggcgacagagccagactccatctcaaaaaaaaaaaaaaaaaaaccaaaccaaacctagatgacgggttcgtaggtgcagcaaaccaccatggtacatgtatacctatgcaacaaacctgcatgttttgcacatgtatcccagaacttaaagtaaaattaaaaaaaatatatttctatcaaaaaataaattcatagaaatccatatcaaataagtcaatactactgcatgttaattttcaaaactaaactaaaaaacatgtacagagcagctctagaatacattagaagcttgtagtagaagttaactcttagaaatgggtgtctaggccgggcgcggtggctcacgcctgtaatcccagcactttgggaggccgaggcaggcggatcacgaggtcaggagatcgagaccatcctggctaacacggtgcaaccccgtctctactaaaaatacaaaaaattagccaggcatggtggctggtgcctgtagtcccagctactcaggaggctgaggcaggagaatggtgtgaacccaggaggcggagcttgcagtgagccgagacagcaccactgcactctgcctgggcgaaagagtgagactccgtctcaaaaaaaaaaaaaaaaaaaaaaatatatatatatatatatatatatatatatatatatatatacagcctacctctcatatctcttagacactcatttcttttttttgtttttttgagatggagtctcactctgtcacctaggctggagtgcagtggcaccatctcggctcactgcaacctccgcctcccgggttcaagacattctcctgcctcagcctcctgagtagctgggactacaggcacccaccaccacacctggctaatttttgtatttttagtagagatggggtttcaccatattggccaggctggtcttgaactcctgaccttgtgatctgcccacctcggcctcccaaagtgttgggattacaggcgtgagccaccgcgactggccgaggtaggctatttttaactgcatttttttcttttgaatttcatacttactgcattttaaaataaaattcaaaatatttaatcagaaatttactttattttttatttttttgagacagagtcttgctgtgtcacccaggctggagtgctgtggcacgatctcaactcactgcaacctctgccccctgggttcaagtaattcttgtgcctcggcctcccaagaaactggtattacaagcatgcactaccaggctcggctaatttttgtttggttgtttttgttgttgttgttgttgttgttgttgttgttttgagacagagtctcattctgttgcccaggctggagcacagtggcgtgatctcagctcactgcaacctccacctcccaggttcaagcgattctcctgcttcagcgtcccgagtagctaggactataggcaaatgccaccacacccagctaatttctgtatttgtagtagagacagggtttcactgtgttagccaggatggtcttgatctcctgacttcgtgatccgcccgcctcggacttccaaagtgctgggattacaggtgtgagccaccatgccagaccaatttatttatttatttattttttagcagaaacagggtttcgccatgttggccaggctagtctcgaactcctggcctcaagcaatttgcctgcctcagcctcccaaagtgctgggattacaggtgtgagccaccatgcgcagcccagaaatttattttaaatggcgttgattcaaacatacatttagttttcattttaaaagctcaaaggtaaacacaaaataacatcaaaatatccattaaggttatatgaaactttttaaagcttaaagtaacagaccacctaattttcttgcctggcttctcaatatttgacaccagagtcacacttttgctgctgaaaagttggctacaaaaaacacgggcaaaccaggtgtggtgggtggttcacaccaggtgggtaggtagtaatcccaatgctttgggaggccaactctgacacattattattaactaaagtccatactatattcagattatcttagacttcctctaatggtctttttctgttctaggatcccacagaggataccacattacattttgttgtcatgtcactttaggcttcttttggctgtgagtttcaaaaaacttttaaaaagtaaaacttaatgttgtaattgtcatgttaaatttcgccctaatttgatatttcaatgtatcataagtgctatgatgtgtcctgcagcatagtgggaccctctgtctaacttttattatgtatttgtttgtgattcaatctcagctcactgaagcctcaacctcccaggctcaagtgatcctcccacctcagctccccaagtgctgagaccacaggcacatgccaccatgcctggctacatttttttgtattttttttagagactgggttccatcatgtagcccagaatggtctcgaactcctgagctcaagagatcgcccgcctcagcctccccaagtgctgggattacaggtgtgagcccaccatgccaagcctgtttttattttctgagacaaggtctcactctgtcatccatgttggagtgcagtgacacaatcttggctcaccgcacctcctgggctcaagtgattctcccacttcagccccccaagtggctgggactacaggtgcaagccaccacacccgtctaatgttttcatttaaaaatttttttttgtagacttggagtcttgccatgttcccagcatggtttcaaacccctggtctcaggtgatccccctgcttcggcctccaaaagtgctaggattataggcttgagccacagcgcctggcctttactaatgtttgattttctgtttatttttgagatagggtctcgctctgtcactcaggctggaatgcagtggcacaatctcgactcactgcagactccgtctcctgagctcaaacgatcctcccaccttggcctcccaaagtgctgggattcctgctgtgagccatcccgcccagcctctaataaagtttttaaaagcaaatctggccaggctaccattccctcaatgagagtgtccccacactcttcctatgcccccagccctaagaccaactcacttaactcacttttactttgaagtcttgtctgacactccttctctgtgctcctttagctttatgtttataccttcgttatggtacttgtactgtgactccctgtttacttatctcctctaccataaagcatgttctttaagtccaggtactctttcttcatctatatgccctatataagaacattttctagtacactagtgaatattatgtgtttatttagaataactaaaggtctccctgtcacccaagctacggggcagtggtgcaatcacagctcactgcagcttctacttcctgggctcaactgattctcctacctcagccccccaggtaactgggactacaggcatgtattagcacacctggctaatttttgtttgtttaatgtggtttttgttttgtttttggtagagacggggttccaccatgttgcctatgtaaataaaatgaaaagaggctggttcatacaagacagtttttattttattcaagttaaccaaggtaaagactcagttctttcacattcttgctcttgcccattcccctttctccattttttccatttcttttcttttctttcttttctttaacagcctgtgttgcccaggctgttttcaaacttgggcccaagcagtcctgctgcctcagcctccagaatagctgggattacaggcacacagtcttttaaaggtgatttgcattgttaaaattatgcccattaagggcatttttttgtaaaatgcttttcttgagacattttattagactgagctcatagggagaacttaaaaaaaattttttttaacaatttttgtaataactttaatcttacctctaaatatgtcatctagtctgatagcctggtcacaggtgaggaaaggttgtgcaagcaatgtctttaattttttagtatattgtggccccctttattaaaatatactactaaacacaaataatacaaatgtaaaatgggtattgttaaaagtttaggccacactgtaacaagtaaaacatgaaagaaagccctcctttctccgtttcatttcttagaggtaatcattgttttcaatttgttacctttcagttttttagtaaagttttaaattacacatgctctttggaagaagtgctttagaaatactgaatatgagtttattgtaattattaacttttgtgattactttcagatagacagactttattttttcaagcagttttaggtttatcgcaaagttgagctgaaagtatagacacagcatcctgcacatttattataatacatttgctacaatagatgaaccaacattgacacatcattatcagccaaagtccatagtacattaagattcactcttgatgtagttctatgagttttgacaaatgtatacagacatttatctaccattatagtatcatagagaataatttcactgctcaaaaaatccacagtgtccacctgttcatccctttattttcttcccctcaaactcctggcaatcactgatctttttactgtttctacggttttgccttttccaggatgtcatatatttgcaatcattatgtagccttttccaattggcttctttcacatattcttgaataagtatccaaggttcttccatgtcttttcctggcttgatagctcatttctttttagggctgaataatattccattggtataccacagtttacttatccattcacctactgaaggatatctggactgctgccaagttttggcaattacaaataaagaatgctataaacatccatgtttttggtttttgtgtagacttaagttttcagctcctttggttaagtactaaggagtatgattgctggattgaacggtaaaaaataggtttaggtttgtaagaaactgccaaactgtcttgtcttctctttctcttgatggtgtcttttgcagaacagaagttttaaattttaataaagtctaacttaccaattatttctttcatgggtgtgcctttggttttccatctgaaaagttatcaccaaccccagtgacacctagtattttgtttacttttacttggtgttcctgtcattgtgatgagactacatttatgttgggggtaggtggaaaatgttttgtgcttcactaccagggattagtgattgctgttaatattttatttttacagcaaaatatgagggagttgatggtgtttatgtttttgtgttaacgttaaagaaaccaattagcttttttttttttttttttgagacggagtctcgctctgttacccaggctggagtgcagtggcgcgatctcagctcactgcaacctccgcctcctgggttcaagcgattctcctgcctcagcctcccaagtagctgggactacaggagtgcgccaccacatccgggctaattttttgtattttcagtagagaaggggtttcaccatgttagccaggatggtctcaatctcctgacctcgtgatccacctgcctcggcctcccagagtgctgggattacaggcatgagccaccgtgcctgaccctttttttttttttttttttttaagacagagtctcactctgtcgcccaggctggagtgttgtggcgcaatctcagctcactgcatcttctacttcctgagtagctgggactacaggtgtgcaccaccacgccagaccaatttattttattttatttatttttttgagatggagtcttgctctgtcacccaggctggcgtgcagtggcatgatctcggctcactgcaaccttcgccccctgggttcaagcaattctcctgcctcagcctcccaagtagcctgggattacaggtgcgtgccaccaagcgtagctaactttttgtatttttaatagagacggggtttcaccatgttggccagactggtctcgaactcctgacctcaggtgatctgcctgcctcggcctcccaaagtgctgggattacaggtgtgagccaccacacatggcccatgataattgtattatagttagtgtatggatactgtagtagggaatatagtgagtggtataccaaaattctcttgtactatttttgtaactattctacaaatctaaaattactttaaaataaaacaaaaaacaggccaggcacggtggctcatgcctgtaatcccagcacttcatgaggccgaggcgggtggatcacctgaggtcaggagttcatgaccagcctggccaacatggtgaaaccccatctctacaaaaataaaaaaattagctgggcatgatggcgggtgcctgtaatcaaactgcttgaacccgggaggcagaggttgcagtgagccaagattgccccattgcactccagtctgagggacagagtgagactcccatctcaaaaaaaacaaaaacaaaaacaaacaaaaagtaaaacaaaaaaccttccagttatggaataatctccaggacatacaattaagaggaaaaaatcaaactgctagaaaatgtgcttgcatgctaccctttgggaaagttaagagtgcataatgcttagtatatggataatatactaagcactctgtgaaagaaccaccatgcaattggaaatagtggggttgtctttgggaaggttaactaagtggttttcttttcactctgaatccttttgtccccaccccctcttttttgttttttttttttgagatggagtctctgtcacccaggctggaatgcaatggtgccatcttggctcactgcaacctacccctcctgggttcaagcaattctcccaccttagcctcccaagtagttgggattacaggcacccgccatcatgcctggctaatttttgtattttagtagagacgggatttcaccatgttggccaggctggtcttgaactcccgacctcaggtgatccgcccgcctcggcctcccaaagggctgggattacaggcgtgagccaccgcccccagctgccttttgtcccttttgaatgttatactagaaaaacaaaaagaggaaggaggaaaaatgtgatttcaaaccccaagggcacaactataataatagtagtagtaatgatgacaatgatagtagtggtgatattttatttcttgcctcctaacccacctccccaccaaaattgagtcattctgacaaacttagacttatcaggatcattctttctaaaaacattcagtatggcgtctgattatctgaaggcctcaacaggatctgaaaggtattttttgctgctgtaccttcccttcaaaacctcacttagatctctgaaattcctttagatctagatgatcatatatcatacaaaccacttcgagaataaaatggggggtaaggctgggtgcagtggctcacacctataatcccagcactttgggaagccaagtggatctcttgagcccaggagttcaagaccagctggggaaacacagggacaccctatctttacaaattttttttaatttttgtaaaaattttttttaatgatggtgtgcacctgtagtctcagctattcaagagcctgagtggggaggatcccttgagtccaggagttggaggctgcagtaagctatgatcttgtcacttcagtccagcctgggtaacagagcaagaccttgtcttagaaaaaaacaaaaaaagaaaaaacaaaagatgctaacagtaattattccaagacaaaaggtataaactaaaactcatggttatcctaataaaaattcataggtcctatattacagcattcctaaaatttagttttaatgactgcttgtaggtatgagctgagggaggtaaaaaataaaatttaaatttaaaaaaatgatgactgcttggaacacttatttcattatctaaatcaacacttcctttctgaatactatatgctttcaaagttgaaatatagtttttcatttatgctgatcaggaatttaagttcaaaagggtcagactggaagcaatctagcttttctaaaaaaaaaaaaaaagtattagattttaaattatatgcatacacccaactgactttccttcaactgcctccactctcaaaaaaaacttcaacttgtggcagatctaatggcaaatgaatacaacctggctgacctgctctgcatgttattaaaatacacagtagctctagttccttacaagtcaaggattctacttccaaacacaggacaaatgtggaaacttctctcttacaaatttggttgtggtgatcatttaagtatcaataaagacaggaattgccttaaatttatccagataaatgaaatcttattatttgctaactggtgctgattctgacgtctacataatcccacagctgtatcctttatgtgattaaactatgtagaaattagtagagacaaattagagctggagaagaaggaattattaggacaagtcaaagatcacaatcaagagcctataatctcaaaaagcaaaacacaatacgaaactctagagagatgttcttagcctcttccctcttcctataactattaaaatttaatacaacttcagtcaggcacggtggctcatgccggtaatcccagcactttgggaggccaaggcaggtggatcacaaggtcaggagttcaagaccagcctagccaagatggtgaaaccctgtctctactaaaaacacaaaaatcagccaagtgtggtggtggtcacctgtaatcccagctgcttgggaggctgaagcagagaacgacttgaatctgggaggcagagactgcagtgagccgagattgcgccactgcactccagcctggtgacagagcgagactccgtctcaaaaaaaaaaaaaaaaaaaaaattcttacaacttctttgaaaaacatttttaaatgaataatattactcaaagttggtggatattggctgggcatggtggcttatacttgtaatcctagcactttggaaggcaggaagatcactagaggcaaggagttcaagacctgcttgggccacaaaagaagactccatccctacaaaaaatacaaaaaattaaattaactgaatgtggtggtacacacctgtagtcccagctactcgggaggctgcaatgggaggattgcctgagtccaagaggtcaagagtgcagtaagcagtgatcgcaaatttcctgggcaaatttccacattcgtcctgtgtttggaagtacaatgaaatcctgtctcaataaataaatgtatgtatgtgcctttaaaaatggaatttaaaaagaaaatgtcccaggagaaaaagcctatccaaaaagaaatggacatcctggggattattagtgtcatttcactagtatacttaaaatttatttcaatttacagccagacgtggtggctcatgcctgtaatcccagcaatttaggaggctgaggtgggtggatcacctgaggtcaagagttcaagaccagcctggccaacatggtgaaaccccatctctactaaaaatacaaaaaattagccaggcgtggtggcgggcacctgtagtcccagctactcgggaggctgaggcaggagaatggcgagaacctgggaggcggagcttgcagtgagctgagatggctccactgcactccagcctgggtgacagagtgagacgtctcaaaaaaaaaaaaaaaagcgcccgtaaccccagcactttgggaggccgaggcgggaggatcacaaggtcaggagattgagaccatcctggctaacacagtgaaaccctgtctctaccaaaaaaaaattagccaggcgtggtggtgggctcctgtagtcccagctactcggaaggctgaggcaggagaatggcgtgaacctgggaggcggagcttgcagtgagccgagatgtagtcactacaatccagcctgggcgacagagcaagacttcgcctcaaaaaaataaaaaactaaggacaaaaaaaaaagagggggagataccaccacctagtttggagagttacttggattagataaatatcttcgaaatgtctttgcaccagacctgacatgtaatatagctggcaacaaacagtagctgatactaccctcaccatatatcacagtagtcaacttttataaaggtgtaatggtcaaggataagcttgtagaaccctaacttgagagtatccagtagaaataccattctcctctccaatctattattttactggaacaaatgaacaaaatggaattttgtcttgttttcttatccttttatgatgccacgataacaatcaggtactcactaatgtttggaaaatggaatgggattatctgctagacccacagacagtgaaaagacaagcaagaagtcataaatgaccaattaaaccactggtttataaccaattaaaccaatggtggtaagccattaggtttttttttttttttttaagacagagtctcattctgtcacccaggctagagtgagtggcagaatcctgactcacaacaacctctgcctcctgggttcatgcaattctcctgcctcagcagcctcccctccgcagtaggtgggactacaggcatgcaccactatgctcagctaatttttgtattcttagtaaagacagggttttgccatgttggccaggctggtcacaaactcctgaactcaggttatccacccaccttggcctcccaaagtgctgggattacaggcacgagcccccacgcctgacaactattggtttttaatactgagatgttctgaaacaaaaattataatctttaataagcataccaactattttctaccagtttattaactggtacaaaatgctgccatgtattaaagaagtacaatgttttgcatactggagataataccaacactttacataccacaatctatataccacagtacatataccttgaagagaggccaatctatataccacaataaacagaatactatacaagaaatcagccaggctcgatggcgtgcacctgtagtctcagctactagggaggcagaggtgggaggatggtgtgagcccaggagttcaagtccagcctgggcaatgtaacaaaattccgtctcttttatttaaaaaggaaagaacaaaagaagtcaaaagagcaaagttcaaacttcagttctgcactaggcaaaataatttatctgggcctcagtttcttcatcttcaaaataggattagtacctcttctatttacttcactgaattattagaagaaccagaaaagaacattatataagaggcatttattaaaccatgacagtatacaactataccatattaccattctcataaccaggtcagattatctttgtaacatcctggtgcctcagttccttaacttcctttcctacaatgatcttgctctccattctgccttaatgatgtactctcatgttcattaacaataatctcaacccttctattaatataaaccctatttcaaacattgtgttctacgaccaccaccttctacctttctagctcattccctacagtactcccactctaacaagtcttaaaccccatcagaatctacaatccattgatcctaccaatttttcaccctctcactacctacattgctgccaccacccccactcccagaagtcctcattcatctccttaccacgcttaaaatcacatggtccggccgggcacggtggctcacacccgtaatcccagcactttgggaggccgaggtgggtggattacctgaggtcaggagttcgcgaccagcctggccaacatagtgaaaccctgtccctattaaaaatacaaaaattagccgggcatgttggcatgcacctgtaatcccagctacttgggaggctgaggcaggagaatcatttgaacccgcgaggcagaggttgcagtgagccaagactgcaccattgcactccagcctgggcaatgagagcgaaacttcacctcaaaataaaagaaagaaatcacatggtccattattgtaatcactcctcgtatacaccctctactcctttgctcctattcacattaactctggttaagagagactggttatcagcactttaactatatgggtatagcacatctaacaaactatagctgaattaatcttcctataagaaagagggctttgactgtctatccctcagcttaagaaccttaaatagctagtgcatgcctgcttacagcattaaaataaaatttatctttgcagccctagtcttcactttttccctatgcccaatcattaattcattgtcctaaaaaaacaaattctgtttgttccacttctttacttttgtcctggctattttttccaactgagtgtacttccattcacttgaaggatgcaatcccatccttcaagatccagcttaaatgctaacttcttcataaaagcatgcccaggccaacacggtggctcacacctgtaatcccagcacattgggaggccaaggcgggcagatcactggaggtgggagttcaagaccagcctgacctacatgatgaaaccccatctctactaaaaatacaaaaattagccaggcgtggtagtgggcacctgtaatcccagttactcgtgaggctgagccacgagaattgcttgaacccaggaggtggaggttgcagtgagctgagatcatgccactgcattctagcctgggcaacagagcaagactctgtctgaaaaaaataaaataaaataaaagcatgtccaatcatcccactttaaggattctctcctttacttagagttatgcatttattagctatactgtttttctgataatcatgctggtttttctgataatcatgctggtcttatgaataataaactaaaccttactacttatgttatctctccaactaaaatgaaaactccttgaaaacaaaaacacttcttaacaaactacccgcacagaaatacttacactacaatacgtacttcttcgtacaaccactattcaaacactgttttatttaattaagttttcaaaaattagtctatattctagaaactattctaaaggtaaatataccccttgttattgctcgcacagatgataccctagtacaatattaaaccaattaaattttcaaccacttttgccctttctttaaagatacctcataatttcactcatagctctattcatagcaacaagggaaattactgacactacagcatacaatccacaagcattagctttaatttctttttttgttttgtttggttttgagatggagtctcactctgttacccaggctggagtgcaatggcacagtatcggctcactgcaacctccacctcccaggttcaagagattctcctgccccagcctcctgagtagctgggactacaggagcgcaccaccacacccaactaattttttgtatttttagtagagatgggttttcaccatgttggccaggctggtctcgaactcctgaccccgtgtgatccacctgccctcagcctcccaaaatgccgggattataggcgtgagccaccgcgcccagcctacctttacttcttctatagtcaagacctacagtatcaaaataatttcttgattttgatcagcactgcctacaaaaatgatgaaaaagtaagctcctcttttcttattaactctggaagaataatgttatgggggctataagacaggtactgacttttccaacaatgtcattattaaaatgtcagaaaactctatgacttttttctattacaactttaaacctgtaaagctattttgtgtctcaattctatgaaacagtaagatgaattagaattcctctttgaaatcaatgtaattaccaaagagtcacaaggatgacaacaaacaactggaacttcatgagatgagaccaaatgcgtattacaaagacactttctggttgcttgagtgacacgcacacaggaattattgtacctcaaaactatcacaagaagaattaaagcaaatggcaggatactcctgttttgctcactaacaacttttattccttactatctatggggcttactaaataacagttacgtgctactcatctgtgtacaatgtcagaacaactttagttgctttttcttcctaaattaggaataaaatactaaacatatttgtttaaattccaaagaaatcatttggtataagaacgaccatacattatacaccttctttcagcctgggcatatttaactttttgcattgactaatacgatatgcattaagcacatttgcttagacctccagagttaaatggacaattcactttttataagtggaaaattattacaacatcttctggtattcactgcaatatcaaatcaatgacttctttcagtatttgtggtggtcatctgtaattcctttggtaattaccatgaatctgctttcacttaatgctaaatggtaatgctaatatgaaaagaaaattaatgccagacttacaagcaaaagtaccaagttgtttcagggaaggaattttaatagaactcacgaactggaatctatctacttcaagctagaaaccattttcattaataaaatactagaaactaagtcacaagagcaaaaatgaaaactttacataggtttctgattcataattaagatctcatgaacttctgctacgctttcagaaaatggcaatcttggccaggtacagtggcacatgcctgtaatctcaacactttgaggggccgaggtgggaggatagcttgagctcaggagtttgagaccagcctgggcaacatggagaaaccccatctctacaaaaatgaaaaaaattagcagggcttggtgacacacctgtagccccaggtactcaggaggctgaggtgggaggatcacttgaagctgggaggtcaaggctgccaggagccatgatcgcgtcactgcactccagcctgagtgacagagtgagaccttgtctcaaaaacgaattttttatttaaaaaaattaaatttaaaaaagtcttgaccacatcaaaaaaacagactgtcagctgggtgcagtggtgcatgcctgtaatcccagcactttggggggctgaggtgggaggatcgcttgagcccaggagttcaagaccagcctgggcaacaagttgaaaccccgtctctaaaaaaagtacaaaacttagccagtcatggtggtacattcctgtagtcccagctacttgggaggctgaagcgggaggattgcttgagcccaggaggtggagactgcatgagccaagatcccacaactgtactctagcctggacaaaagagccagacactgtctccaaaaaaaaaagaaaaaaagaaaagaaaaacagactgtccttttaaaaatttttatcatgtacccagatagacagaaatcacatggaaatgtatctcaattatgaagcagcacaatcaggatagcttattacatatgtatcttgaaatatttttaagtcacaaattttagctttggttatacaatttatcataaagacatgagaaactgtgatgaaagaatccctttgcagtactctaatgagaactgtgttacatgtatagaagaaagggaaaggtacaacaggagtacctgtttttctatcattttgactgtattgtaagagccctgaaataatactcggcataatactctatttgtccagatctgtttcttcctgcctcccatgcctactttgaaaacaaataatatacatcatcacatgaagtcctctgatcacagttcttcccaaccccaatctttcctaattacaacttaagtctctctctgtgatgttgagatgtccttgatatgtcccacatttgaaaagtgattatataccatttacccttcaaatcacctccagggaaacttctcttatgctgactttactttggtcactctcgatctcctaagaatgtattaaccaatgtcaatatcattttgcatttgctaacaatcatgtcaattcagcatcagtattttgaaactggtacagccctgattctaatccttttcacttatcatactatgagacagggaagagtaatgattttgtataaatttcagtatcccaagccaaactgacattaattttcacagcttgtggcatttcttccagattacgggagcgagacataggaaaaacgatttaaaacacttgtccatgtgtcatatctggcatacctgaattacaatgccaactatattacatacagaaaatacactaatatgcttctgtgacttaaatatcttaaaactatgaacctcttcacttaatagtctcaactaagaatttcctaagggtcacatactggttacatatggaaacacaaagaggattcctacaaacatactgcataaatgtaatacatgactagcttattgctatttaccattatgattacttacatagattacagaaagttcttgggcaatttctgtatttttattacgacctttaacatagcatgtcttgtttctcttatcaacttatcactcactgatctattactgtagttccttttcattagaaataaaatgcagagggccaggcgcggtggctcaagcctgtaatcccagcactttgggagaccgaggtgggtggatcacctgaggtcgggagtttgagaccagcctgaccaacagggtgaaaccccgtctctactaaaaaatacaaaaaaattagctggacatggtgggacatgcctgaaatcccagctactcgggaggctgaggcaggagaatcacttgaacccgggaggcggaggttgaggtgagccaagatggtgccattgcactccaggtgggcaacaagagcgaaactccatctcaaaaaaataaataaataaataaaatgcagagaacactcggaacacgaatcatcagtcctctgcaggtacatatactaaagaacatttcctcaccagcattcagctgcatcaccaataatagctgcgcaaccataaaatgctaagcactgtttcttaatggcaccgtatagctagctgtacatcactgtacaaacaaaactttctttaatgaacctgtaatccaaagtgttgattatcttaagttatacattttccattagtttgtgtaacacttcaatttgggaacaaatatatcttaatctggtaaatgctggcagaagtaatatctcattcagaaattgaggccagattcttaaaggagtagttaaaactcttaaaacatttgtaaaaataaatacatcagcttagattacaaagatttccaaagattaaaaaaaaaaaaaacacttaaaaggctagacaaaagaatgtctaaactaaaacaggtaacaatatatcctctatgacacaatgtaatttatcattgttgaaagcctccctagaagccgttgggagaccagaaagagacagatctggacaaaaccaaacaaaataaaaactggaactgtatcacctttctaaaagctcccttattctttgtcacctataagtctatcctccacatttgatgacccaattacagctacataaaatgtataattgtcagcagcagacagaatggtcatgaggacaagtacaagaatccaaaagccagtatgaatttaggctctgccatttaacagatgtatgtaattggctaagttacttaattctctgtgcctcagctgaaaacggcagtaataacagtacctacctcgtagggttatagtgaagactatgagataagacacataaagcctgtggaataggacctgtttgttattataataaagttaccaattaaaaaaagttaggtccctgataattattaatctctatatacatgagtgcttcaagtggcataccactgttaactataacttttcactatatatacaaaataccttcgcaactttaggtattcacaaattttaatagcccaactccctcactccataataatttcaagagacatcaaactctccaaaatttgcacttgataaaccggtaaagagtgaagttctacaactttaaatcatcctgctaaattaaaggcaaagaaaataagtcatctcgaacttaccagagaagatgaacaatttccagtgctacaagatctgttgaaagcaacaagatctatccactgtgtttggaaacctactatgacttgttttcaagtatagtcagtggcttcacccaaaaccttaaaaggaggccacgtttaattttgaataacctgaagctgaaaatgtttcagatacattattcacaggagaatcctattacattacattctctcaccaataattttgaatcaaaatacatcattaaatgaaagtcaatctgtattttccctttattaaaacatctagaaaaataccactttatttttcaatgaatgtactttagaaatgttaacataatttataaaagttttaacatcttacaactgtctaaaaaggtttccattcccaataccctatttacccaaaatgctaggacatctgaattttaaaaaccaacattttcggccaggcgcgatggctcacacctgtaatcctagcactttgggaggccgaggcaggcggatcacgagtcaggagttcgagaccagcctggccaatacggtgaaaccccatctctactaaaaatacaaaaattagccgggtatggtggcgggtgcctgtaatcccagctgcttgggaggctgaggcagaagaattgcttgaacccgggaggcagaggttgcagtgagccgagatcgtgccactgcactccagcctgggcgacacagcgagactccatttcaaaaaaaaaaaaaatttttcctggctgacccaatttaacaggggttggttctttcaacatataagcagaaaatgaagtatacgtatcatcttcaaaggactaccatgaaaccaaaatcgggttttgcaatacccaactaaagcatcagaagacagggtcatcttacttggaaactgagtattgaaaaagtacaggctaaccccctgaatgtttttcaggaaacagcattcacactctgctatccacaattttcaaaatcttcattaaaggccctgaaaatcctgtttgctaagcctgctggaattctgtggttgacagtcatcttccctcaaaacttaactgtccatattatctattttcgattttattaggtcaccttgagattattctctcctctgaaaagcatttgcgggctttagttatcagtatgtctctaccggtaatttaaaaatcaataaagctcatacaccttgcagccaactcatattttatagtgcttgctaatatatatatatgtgtgtatatatatatatttctcagggatcaaaaggctaacatgaactgcttcaaactttggtgaatctgcattatatccttagaacatcctgagactctcctgtattgtgctgcagctatacagcaggcgcatgatcacaaggctttttaacagcccccagatcccttactgctgcaaaacttctcataagcgttctatgtactagactgttaacagtgctgagttaaaattgttaaactgctttacctatttatttaccaatcctatcatctcagggaattcaaactctttaaactgccttctgaaacacatctagagtgctttcgtactgctttgagtaggatctgcagcgggataaaaacttgagttctgagattcatcccgacccaaattgcagttgccaggatatgcggtagtaatgcagtgttttttttttttttttgagactctacggatgtattttacctagaaatagccaatctctactaaatcccttttagtcttcgagatttccgcggtaacaatttcaacagaaaggtattttcaacagcgaaaaaacaagttattctaatttggcctttattttttactcaatagagcttgccatcgtaagggcatttttccatactaacatttgcaattgaagaaagaaaaatcaagcttttggcactagtgaccccatgcgtggacggcctattatcatcacgcttctcacaaatctttcgagataggatttgaggttaggctcacatcggatcatagtccagtaacttactgctttccaagcccaattaacagcctaataacagcaacacttatgccccgcgaaatctcaatgtatgactaaccaataaggcgtctgatagcgaaggcaaccttttcccaggtaaggaagaggaaaagcagacaatgaaaggaattgatttatcacagtgaagaaagaaaagagaaggaccccaaaaggatccgtgagagcaaaatcccggggttcggaagccttggcctcagcaatactctcccccaagccctctcagcccaacccaaccacccctcttgtcccctgggagccagcccttcgccggcacagatcgggcagacctggagggcacagcccctcacacggcgctcaggcccggttccgaaatccgatgccaaacaggcggaagccgcaagccccgcggcctgagtttcaggggtaagagaatgcgggtgcgaggagatgcggcctccctcaagccgggaggcctcttgagaaagcagagacgggagaagagcgagctggttcgcaagtcggagcaaaactggaaggaaagagggctgggagccggagatgaaggaggttctgggctagaccagcgccttccccgcatcctcggcgacgcccgtgtttacctgaaagtctcggtcttcgttgaagcgggagaagcggtccgccattttgccgccttcactcctctcaggacgacgctctccggttcgctccttccctcctgcgacacccacccctccccggttccccgcctcctcccacgcccaccgggcgcgcgcagccgagggagggagcgagaatgcgcgtcctgacgggagccccgcggcgcaggcgcctgccagccctggaggctgacccttccctctagcccctgctccgcgcgcgacccggagcgaccccggtggccgcgcgtgcgcactcccgcccgagagccgcgagagcttccggagggaaaggtcagagggggcaccgtgcggacaaatctggatgttttgctgttgctcacttccgggtgtcttttctcactgttgcttccccgtgtgcgcagaagtccatcgtcttcactaaatagcagcataatgttgggccgaaagcgcgaccttagagccagactgcttagcttcgaatctcagctcaccctgaggattcaacggtgaacgagacaggaatgatctcctcttatggggatttcattccagtggaagaactcacataactcgtaaaataaatatttttaaatatcaacaagtgccacaaaaaagtaaaactggccacagtgctgagagggacagtctctgaaaggacctttgaccgaggcacagcgaggagcctacagcattggggcatagggaacgttagacccaaaggcccaaagactgcaaggagcttgacttcgagccatcctttgagagaagtatttcacaagggaccgaagttgatccagatcgactaaagctctctgggcttcagtttcctttttatacaatagggaaattggattcagtaatctctgatgctcctgcctagcgctgactatgagagtcaagaatcggatttttccatcccttctgaggacctcacccagtgctccaggactcttagccaaaatacataaaacacatagaagggtggcaggacttctctccttttgaaaagagtagttgacagaaatcacacaatggaaaaatgggtcttaccctgccctgaaagagtcaaatggaatgtaattttttgaggaagggtgtgtattttctagctgttaccctttgccccacccatgcttcagcctacgcttccatctaaggggaggcagggcacacagaattcaaacattgtattctttttttttttttttttttgagacggagtctcgcactgtcgccggagtacagtggcgcaatctcggctcactgcaacctccgcctcccaggttcaagagattctcctgcctcagccaccctagtagctgggattacaggcgcccaccactaagcccagctcatttgtttttttttttttttgaaaaggagtctcactctgtcgcccaggctggagtgcagtggcgcgatctcggctcactgcaagctccgccttccgggttcacgccattctcctgcctcagcctcccgagtagctgggactacaggcgcccgccaccaagcccggctaattttttgtatttttagtagagacggggtttcaccgtgttagccaggctggtctcgatctcctgacctcgtgatccgcctgcctcggcctcccaaaatgctggaattacaggcgtgagccacctcgcccggacttttttttttttttttttttttgtatttttagtggaggcggggttcaccatgttggcaaggctggtctggaactcctgaccttgtgatccgcccgcctcagcctcccaaagtgctgagattacaggcgtgagccaccgagcctggctcaaacattgtaaagagacttaagggtagcgtgaaagattgaatcacgaggatacacatcacactgacctcttcttcctctcaaaagcccactgaaatgacagcagaggaataagaagtgcataaattcacatggacaaagagacctggagaagagacaatggcagacaacagatgtcaacattttggaggccagagagcacagataaatggaaatgactttagtagagtggagaaaaagaagtcatagagtaggagaagacaggaaagaagttgatcaatgctaaagtgcaccagaaaggctcaggaagtagaagcccctggtgccactgatgattcgatgtctcttttcccacccaggtagcaaactagaggttttccctctggaaaggctgaaccagagagactggactttataggtgagaaggagcaaccatgctgaaaatgggaggatatggtaaagcctccattctggccagagagtctgacttctccaacaaaagaacataggaaccctctctagaaaattgactagcttagggaagaaaatgcttcatgtaccaacaatgggagtgagggtagggaggtgtcttcctacataaagatcatgttcctgcccaaatactccacagagaagtccatcattcaggaagccccatccacacagacctttcactcagctttttagtgccttgttatgaatggatagccaaagaatgccagacatttgaagggaacctgtaacaggaaagatagaaacacccccagcctgggcattgtagtaagaccccaactctgcaaaagaactttaaaactaggcgtggtggcatgcacctgtggtcccagctacttgggaggctgaggcaagaggattgctgaagcccaggatttggaggctgcagtgagctatgatgacagcaacagcccccctcccccaaaaaacgaattcagaggaaccagagataatgaaaggaacagaagaaaccatcaaaagaattatcaacatccacggagacattatatcacatcagggtacaagggaacacatcaggaaataagagactgcatcaaggggcatgggatgccaaaaaagaaaaaaggatattgagtttaagaaagaacttttggccggcgcggtggctcatgcctatagtcccagcactttgggaggctgaggctgaagcaggcggattgcctgaggtcaggagttcgagaccagtctggccaacatggtgaaaccccgtctctactaaaaatacaaaaaaattagccgggcgtggtggtgtgcacctgtaatcccagctactcgggaggctgaggcaggggaattgggcgacagagcaagactccatctcaaaaaaaaagaaattttggggctgggtgtggtggctcatgcctataataccaccactttaggaggccaaggcaggtggatcacttgaggtcaggagttggagaccagcctggccaacatggtgaaactccgtctctactaaaaatacaaaaattagccaggcgtggtggtgagtacctgtaatcccagctactcaggaggctgaggcaggagaatcgcttgatcccaggaggtggaggttgcagtgagctgaggccacgccactgcactccagcctgggtgacaagagcgacactccatctgaaaaaaaaaaaaaattagccggccagggtggcgcatgtctgtaatcccagctactcaggaaatcacccagaaaacagactaaaaagacgccctggtctaaaccacctttactttctcctgaattattgcagtagctactacgtgttctgcttctaccctggcagcatacatgttacaaaggagctctggtgatctgttaaaggtcaatcagatcacatatgttgtcccctgattcaacgcacagtgactttccacgtcactcacaatataaagttcacctcttaccaccccacctctcaccgccccacctctcagacctcatcttcctctctccacccctgtttcccttctctctggacatacgggcctcttggctgtaccttgatcccatcaggcctgttcttgcctcagcctgcctcacccatgggcttatgtattcgctgttctttctgcttatcattcttatatatctccttggcttggcccttcatcttctagtctttattcaaaaagtactttttttttttttgagatggagtcttactctgttgcccaggctggagtacagtggtgcaatctcggctcactgcaacctccgcctcctcagttcaagcaattctctgcctcagcctcccgaatagctaagattacaggtgcccaccaccatgaccagctaacttttgtatttttagtagagacaggttttcaccatgttgaccaggctggtcttgaactcctgacctcatgatccacccgcctcagcctcccaaagtgctgggattgcaggtgtgagccaccctgcccggcaaaaagttacttctttttttctttttcttttgagatggagttttgctcttgttgcccaggatggagtgcagtggtgtgatctcggctcactgcaacctctgcctcctgggttcaagcaattctcctgcctcagcctcctaagtagctgggattacaagccagcaccactacaccaggctagtttttgtacttttagtggagatggggtttcgccattttggccaggctggtctcaaactcctgacctcagttgttccacccacctcggcctcccaaagtgctgggattacaggcatgagctaccacgcccagcccaaaagtacttatcacttttctagtatgtaatataaactctatgagggcagagatttttcttagttttgtttttctatctccccagcaccaagactaatgactggcacatagtaggcactaaatattcactgaattgatgaggtggaaaatgggaaagaatgaataagaacatgttggcatcaattcaatatctgaatagtaggacttacagaaataacaaaggaaaatggaagaaaagcatattaaaaagctgggcatggtggccaggtgcggtggctcatacctgtaatcccagcactttgggaggccgaggcaggtggatcacctgaggtcaggagttcgagaccagcctggccaacatggtgaaaccctgtctctactaaaaatacaaaaattagctgggcgtggtggcgggtgcctgtaatcccagctactaggggggctgagacaggagaattgcttgaacctgggaggcagaggttgcagtgagcagagattgtgccattgcactccagcctgagcaacagagcgagactccatctcaataaataaataaaatacaataaaataaaaagctgggcatggtggagtacgcctgtatcccagctactgggaagactgaaggaggaggatagctttaagtccaggagttcgagactgtagtgtgctatgatcatgcctgtgaatagccactgcactccagtctgggcaacagagtgagaccctatcccttaaaaacaaacaaacaaaaaaggattcgaaatcaatttttttaagtatattaaataatgtgtgaacatcttctagtactaagggcctgagttctaaattgagagatcccaaaacaatggatgaaaaagaatttgctgccaggcacagtgttgtgaaatttcagggcacgtgggacaaagagaacctcctaaaggcttccagagaggaaaactaggtcacatatgaaggattgagaattggaatgatgttggtcttctccagagaagagaagactgggcagtaatacaccaacttagaaatctatacccagccaaaccattaatcaactatgagagggaaaaatgacatttttttgacctgcaagccctcaaataaattttctctgggagccactgaaggatattttagagcaaaacaattacagaaacatatattcagtgttatggttgaggtgctacagaagacacaaagatgaagaggaaaagatttattctagggtttataaacaaaggcattgccatcaggtaaacctggatttcaaactcaacctctgtcacaaaaagtacctgtcagttaggcacagtggctcacacctctaatcccagcacttcgggaggctgaggccagaggatcacttgagcccaggagttcgaagttgcagtgagctatgatcccaccacggcactcctccagcctgggagacagagcaagaccctgtctctaaagaaaaaagaaaatcaagaccaacgtgggcaacacagtaagaccctgtctataaaaataaaataaaataaattagccaggtgtggtggcgtgcacctgtagtcccagctacttgagaggctgaagtgggaggatcatttaagcctgggaggttgaggctgcagtgagcacacccctgcactccagcctgggtgacagagcaaaaccctctctcaaaagaaagagagagaggggggagggagggagagagagagagatagagaagaaaaagaaagagagtgagagaaaagggaagagagagagaaagaaagagaggaaggggccaggcatggtggctcacgcctgtaatcccagcactttgggaggccgaggcaggcagatcacgaggtcaagagattgagaccatctggccaacatggcgaaaccccgtctctactaaaaatacaaaaattagctgggcgtggtggcgcatgcctgcactcccagctacttgagaagctgaggcaggagaatcgcttgaaccatggaggcggaggttgcagtgagccgagatcacgccactgcactccaggctggtgacagagccagacgccttctcaaaaaaaaaaaaaaaaaaaagagaagaagggagggagggaggcaggcaggtaggcaaggcaggcaagcggggtgcaacagctcatgcctgtaatcccagcactttgggaggccaagacaggtggatcacctgaggtcagaagttcgagtccagcctggccaacatggtgaaaccccgtctctactaaaaatacaaaattgcaaggagtggtggcacatgcctgtaatcccagctacttcggaagctgaggcaggaaaattgtgtgaacccaggaggcagaggtggcagtgagccgaaattgcaccattgcactccagcctgggcgacagaatgagactgtctcaaaaacaaaacaaaacaaacaaaacccccccacacacaaagaaaaaagaacagtctgggcacagcggctcacacctgtaatcccaacactttgggaggccaaggtggacggatcacttgaggccaggagtttgagaccagcctgggcaacatggagaaaccccgtctttagaaacaatacaaaaattagccagcgtggcagtgtgtgcctgtagtcccagctatctgggaagctgaggtgggagaatcgccggagtctgggaggttgaggtttcagtgagcagtgatcacaccactgcactctagcctgggtgacagagtgagaccctgtcttggaaaaaagaaaaaaaaaaaagaagaagaaaatcagtccctgtcaacaatatatgaaagtagtaatacaagaaataacacgtgaacattttccagaactgaaggacctgatagttggctgtatatcaggcgctatgcttaacactttacatggattatcaaagtaatttttgacacattaaaggcaataaacttgattatctccactttacaaatgagaatactgaggcttagagataagaaatgtgggggaccttctctgttggctttgagcccctccgtctttctctgtagaggggagtttcttcctctgtcttctcccttcttgcctattaaactctccactccttaaaaccactccacgtaggccgggcacagtgactcacgcctgtaatcccatcattttgggaggcccaggcgggtggatcatgaggtcaggagttcgagaccatcctagccaacatggtgaacccccatctctactaataatacaaaaattagccggctgtggtggcacatacctgtagtcccagctacttgggaggctgaggcagaagaattgcttgaaccgggaggcggaggttgcagtgaacccagatggcaccactgcactccagcctgggtgacagagcagagccagactctatctcaaaaaaaaaaaagaaacaaaatgcaaaaaaaaagaaacaaaataacgctccacgtgtgtccgtgtcattttatctaaaccagcatgaggaccaagaaccctggtgttcctccactcatcagaagcgtataattttgtccatggtccgggaaaggcaattcaatcatcagactgaagcaatcaaactccaaatggtgctgtaaactgaaccacacagggacacgccattcttttgacgacccatagatcgactctaggaggagccctagctgctgttccccattcgaagccccttttcagcaggaagtagccagaaagagtcattgcccaaaaccccctaacagcagttagtgtggcatctccacaggggggaatgttgtaggaaaaggggtccttgggaagttttcattttttaaagcatctccggaaaagtttcttgtaaagccccagctcttatagccaggccagcaacctttgatatgtaaatgcaggtcatcagaaactggatccacccaaatatggagattccttcggccttcttgcccttttcccagttgtttctggcaacatggccactcttacatatcccatgtgtgtagaacatcacagcgccctgtatttgcatattaaaaggctagggtgggagggccagctttttcgtgggctatgtgaatgacatgcctagtcaaaccaatcccctgagtcccatgcaaatcaaacactgcctccttcagcctctgcatatatagctggctggtatccctggcaggtagggacctcctctttccacgttggagcctcattccctctgtctctgtatgggggagcttcttccttctgtcttctcccttccttcttgccaattaaactctccgctccttaaaaccaaaaaaaaaaaaaaaaaagaaagaaagaaaaaccttgtcctggctcctgtagctatggaagacagagccagattttatgactgtggtcaagtcccttagcagctggtcaggtttcctcctcagcatatctggaaaataacagcatgcagcccccacacgctctgtttaatgttcaaaagcttgttgtaaaatatacataacgaaatctgccattttaaccttttttttttcttttgaggcggagttttgctcttgtttcccaggctggagtgcaatggtgtgatttcggctcaccacaacctccacctcccaggttcaagcgattcttctgtatcagcctcctgagtagttgggattacaggcgcatggcaccacgcccggctaatttttgtatttttagtagagacggagtttcatcatactggtcaggctggtctcaaactccagacctcaggtgatctgccggcctccacctcccaaagtgctgggattacaggcgtgagccatcgcgcccggcccattttaaccttttttttttttttaagacgttgtctcgctctgtcgccccaggctggagtgcagcgtcaggatctccgatcactgcaagctccgcctcccgggttcacgccattctcctgcctcagcctcccgagtagctgggactacaggtacccgccaccatgcccagctaattttttgtatttttagtagagacggggtttcaccgtgttagccaggatggtctggatctcctgacctcgtgatccaccacctcagcctcccgaagtgctgggattacagccgtgagccaccgcgcccagccgattattcaattcttaaattgcaaaatttctctctctctctctctctcttcctctctgtatatataagtttatgttttgggttttttgtttttgtttttgtttttgtttttgttttctgaaccatttgaaagtaagttgcagaccgggcacggtggctcacgcctgtaatcccagcactttgggaggctgaggccggcggatcacctcaggtcgggcgttcaagaccagcctgaccaacatggagaaaccccgtttctactaaaaatacaaaattagccgggcgtggtggtgaatgcctgtaatcccagctactagggaggctgaggcaggagaatggcgtgaacccgggaagcggagcttgcagtgagccgagattgcgccactgcagtccgcagtccggcctgggcaacagagcgagactccgtctcaaaaaaaaaaaaaaaaaaaaagaaatgtaatgttcaatgttcatacaataatgttatctaatataaagtccatattcagccaggtgtgagggctcacgcctgtaatcccagcacttcgggaggctgaggcaggaggatcacttgaggtcaggagtttgagaccagcctggtcaacatggcaaaaccctgtctgtactaaaaatacaaaaattggccgggcgcagtggctcacgcctgtaatcccagcactttgggaggccgatgagggcagatcatgaggtcaggagatcgagaccatcctggctaacccagtgaaaccccatctctactaaaaatacaaaaaattagccaggtgtggtggtagacgcctgtagtcccagctactcaggaggctggggcaggagaatcgcttgaacccgggaagtggagcttgcagtgagccgagatcgctccactgcactccagcctgggcgacagagcgagactccatctcaaaaaaaaaaaaaaaaaaaaattagccaggcgtggtggcaggaacctgtaatcccagctactcaggaggctaaggcaggagaatcgcttgaacccgggagatggaggttgcagtgagccaagctcctgccactgcactccagcctgggcgacagagcaacactctgtctcaaaaataaataaatgaataaataaataaataaaaatagggtccatattcaaagtacctcatttttggtctttagagctacttgcttttgatccaggatccaatcaatgatcaggcattgtttttagctgtcatgtttcttcactattttttcatctacagcagttccattgactttggttgtcttttgttgcattgaacatgcccttcaattgggatttgtctggcttatgactagattcagttgaaacattttgcaagaatactaaataggtggtgctgtgatcttctcagagcacaacatgaggaggcacatggtatcaactgtcctcattattagtgatgtcaagtttcatttattggttaatgtattgtcagccagactgctcccttgtaaaagatgatactttgagaccatgtgaatatcttatttttcaacagcctttcactccatgggtttttgtggagttttgattgtttgttttatttatttatttatatttatttattgtttttgagatggagtctcactctgtcacccaggctagagtgcagtggtgtgatcttggctcactgcaacctccgcctcccaggttcaagcaattttcctgtctcagcctcccgagtaggttggactacaggcatgcatcaccatgcccagctaatttttttgtatttttagtagatacggggtttcaccatgttggtcaggctgctctcgaactcccaacctcaagtgatctgcctttcttggcctcccaaaatgctgggattacagttgtgagccaccgtacccggccaattgtttgttttaaagacagggtttcactctgttgctcaggctagagtgcagtggcaccatcagttcactgtagccttgaactcctggtctcaggcaatcctcccacttcagcctcccaagtagctaggactctaggtgcctgccaccatgcaaagccaatttttatttttattttttgtagagacagggtctcgctatgttgcctgggctggtctcaaactcctagattcaagtgatcctcctgccttgacctcccaatgtgctgggattacaaagtttattatccactgatagtccttgcctgaattgtttattacaaacaatggttacaaaatcatgattctttaattctattacttcttctacaattattagtaggaatgctataaagatgaactttctctccttgccgcctaccattttagaatatcactgtggattcatagatttttttcctgaattttttttttttttgggacggagtctcgctctgtcgcccaggctggagtgcagtggcacgatctcagctcactgcaagttccgcctcccgggttcaagcggctctcctgcctcagcctctcaagtagctgggactacaggcgcccgccaccacgcccggctaattttttgtattttagtagagacggagtttcaccgtgttgcccaggctggtctcgaacacctgagctcaggcaatccgcctcggcctccctgtgctgggattacaggtcgtgagccactgcgctcggccttttttttcctgattttataatccatttttgttgttgttttgctttgtttgatggagtctcactctgtcacctgtgctggagtgcagtggtgcgatctcagctcactgcaacctctgcctcctgggttcaagtgattctcctgcctcagcctcccgagtagctgggattacaggcacatgccaccatgcccagctaatttttgtatttttagtagagacagggtttccccatgctggccaggctggcccagagctcctaaactcaaatgatccacccacctcggtttcccaaagtgctcggattacaggcgtgagccactgcgcctggccaggagcatttttcaaaggaaaaaaaaaatcaccactggccatacaggaccccctgtggtagatagccagtatgctagactggtgccttggagtacattctttagcacactccttcctttattcatcaaatatttatcatgtgcctagtccgaatcagccctgctctagatgctgaagacgccagaggtgagcatggcaggaaaggttcttgttctcattgagtttatgttctggctgggggagccaggtaaggagacagacaatatacaagtaaacaaatgagatcatttcaagcagggcgaggtgctgagaagataacgtggggtgatgtgacatagaggaactgtgtgaggctgctttaaattaagcaatggtcaggtgagacctctggaccaggtgacaattgagccaacagctcgatgttataaactggggcacagtgctcctgaggtgcagcccaggccaggcgagaggcagggccacttgtacaggctccacactcagaagagcccttcgcttggtttcatgctctgccacagccatcttgaaattcttagtaatttttgtttgtttgttttttgagacagagtctcactctgttgctcagggtggagtacagtggtgcgatcttggctcactgtaacctccgcctcctgggttcaagcaattctcccacctcagccttccaagtagctgggactacaggcacacactgccacatccggctaatttttgtatttttagtagagatggggtttcaccgtgttggccagtctggtatcaaactcctaacctcaagttatctacccacgtcggcctcccaaagtattaggattataggcgtgagccaccgcgcccagccgaaattcttactaatttttgatggagggtcccacaacttctttttcactgggccccacatattacgttgccagtcctggttagagacactgcaagaaggggctgggggagaatatttcgaggtgaagtggaaagggaggcaggggccagctcacctaggaggggcttgaagtcactataaggagttagagctagccagacccagcgactcacacctataatcccagcacttttggaggctgaggcgggcagatcacttgaggttaggagttcaagaccagcctggccaacatggtgaaactccatctctactaaaaatacaaaaaaattagctgggcgtggttgcgtgtgcctgtaatcccagctactggggaggctgaggcaggagaatcacttgaacccgggaggtggaggttgcagtgagccgagatcgtgccgctgtactccagcctggacaacagagcaagactccatctcaaaaaaaaaaaaagagagagagagagagagttagacctttgacagatttagagaagagaagcaatttgatcttatttacattttcaagagactcaccactgcctgtgtgtggagtatggattgtaagggtgcaagaatggaagtgggagaccagagaagatgctgttacagtaatttccatgacaggtgatggacggtggcaacagaaatagaaggtaagtttaaagtatattttgcagacaacttggcaagaagataatggattagatattgaggatgaggaaaagggtagaattaagaatgacttccaggttccaggtgtgaggaaccaggctggatttggagtcatttactgagattggtaaggttgagtgggtgggggacaaatttggtagggtttcaagaattgcattttggccaggcatggtggctcacacctgtaatcccagcactttgggaggccggggcaaggatcacctgaggccaggagttcaagaccagcctgggcaaaatgttgagaccctcctctctacaaaaaaatttaaaaaattgtctgggtatggtggctcatgactgtaatctcagcactttgggagagcaaggcaggagagttgctttttgtggagactctgactctacatctagctcactcctgccccgaattcctgcgctcaagtgatcctcttgcctcagcctctctagtaactgggactacaattgtgtgccaacatgctcggctaatgttttttttttttgagacaggatctcactgtctcaaaaactgtctcaagcaatgtgatctagagcagggctgattcagactaggcacgtgataaatatttgatgagtaaaagaaggaatgtgctaaaaaacaccctctaagacagcttagcagcctggctacctatcacagggggtcctgcctggccagtggtgaatttttttttcctttaaaagttagttggataaggtggcatgcaccgttggtttcagctactcaggaggctgaggtaggagaattgcttcagaccaggaggtcaaggctgcagtgaaccatgttcaagccattgccctccagcctgggtaacagagtgagatcctgtctcaaaaaaaaaattaggctgggcgcagtggctcacgcctgtaatcccagcactttgggaggacgaggtgggcagatcatgaggtcaggagatcgagaccagcctggctaacacagtgaaacctcatctctactaaaaaatggaaaaaattagtgggacatggtggcacatgcctgtagtcccagctactcgggaggctgaggcaggagaattgcttaaacctgggaggcagaggttacagtgagccgagatcgcgccactgcactccagcctgggcgacagagtgagactccgtctcaaaaagaaaattagccaggcatgggggcacacaactgtggtcccagttactagagatgctgaggcaggggcatcacttaagcccaggagttggaggcagcagcgagctgtgatcaagccactgtaatccaacctgggtgacagggcatgaccctgtctctaaaaaaaaaaaaaaatgcattttggtaaatctgagatgtctctgagtttaaatggatatgaaaaaatcaactgtctatgtggttctgtgtttagaagagattctcaaagtggtagcagaataacatgggaatgtttgaaaaataacactgattattgggctccactccagtcctgccagtcagaatgccatcctcatccctcaaaccatgattctgatgcccatgaacatttgaggcagactgcttctagaatttctatgaggcagggtgcagtggctcacgcctgtaatcccagcactttgggaggccaaggtgggcagatcatgaggtcagaggtttgagacgagcctggtcaacatagtgaaaccctgtttctactaaaagtacaaaaattagccaggtgtggtggcacgcacctgtagtcccagctactcgggaggctgaggcaggagaattgcttgaacccaggaggcggaggttgcagtgagcctagactactgcaccattgcactccagcctgggtgacagagcaagactccatctcaaaaaaaaaaaagaatttctatgaggccacaagcatttctatgagcccacacctgtaatcccagcagtttgggaggccaaggcaggcagatcacttgagcccaggagttcaagactagactgggcaacatggtgaaactccatctctacgaaaaacacaaaaattggctgggcgcagtggctcacccctgtaattccagcactttgggaggctgaggcgggtggatcacgaggtctagagatccagacctggccaacatggtgaaaccccgtgtctactaaaaataaaaaattagccgggtgtggtggcgcacgcctgtagtcccagctactcaggaggctgaggcaggagaattgcttgaagctgggtggtggaggttgcagtgagctgagatggtgccactgcactccaacctggcgacagagtgagactccgtctcaaaaaaaaaaaaaaattatctgggtgtggtggtgacatgtgcttgtaaccccagctactcaggaggctgaggtgggaggatcacttgagcctgggaggtcaaggctgcagtgagcaagtggcgatcccgccactgcactccagtctgggcaacagagcaagagcctgtctcaaaaaaaaaaaatgtatttctatgaggcaaggggctgtggcatccaccttccctctgaagattctccaggctgagagatgaagcaatcacctcaagagacttactgaatatttaagcagggattggccccggacacttggcaccattcagactttggaggaacagacctgatttagatatgatcttcaatgtccatgggtctggtgtagggacaggaaagagtctgtaaggggttcagtgtggactgaggtctgactctccttgacaggggaagactgataagaggtgatgaaggtctgaactagattttttactattttattcttttaaaacgatttttctacatatcagtacaaacaattttacctaaacacattaagtgttattctatcttccaaactttttaaagcagtgttttgtttgtttgtttttgagacagggtcttcctctgtcacccaggctcgagtgcagtggcacgatcatggctcactgcagcttcaaactcctgggctcaagtggtcctcctacctcagcctcctgagtagctgggactacaggcacacgacactatgctcggctaatttttttatttttgttttttgtagagacagggtttcaccatgttgctcaggctggtctcaaactcctgggctcaagcaatctgcccaccttggccttccaaaatgctaggattacaggcattagccaccacaccaaacctagtcttcttcttttttttttttttttgagacggagtctcgctttgtcaccaggctggagtgcagtggcataatcttggctcactgcaacctctgactcccatgttcaagcgattctcctgcctcagcctcccaagtagctgggactacaggcgcgtgccaccatgtccagctaattcttgtattttcagtagagacggggtttcaccatgttggccaggatggtctcgatctcttgacatcgtgatctgcccgcctcagcctcccaaagtgctaggattacagaaatgagccactgcgcctggcctaatcttgtttttaaacttcttttttcctctccttctctcccaaccaggtaacccatgtccactacccagtttgtattcattcactttttattgctcatatagtcatatatatacacacatatatatgtgtacaggaaatataggggatttgttgttagttttcaaaaaacaggatcacattattcacactttttgcttcttgcttttctttctcaacaatacctcctaaatattcctccaagacaattgttacagctctacagctcccttcttttttgttttttgtttttgtttttgtttttgagacggagtctcgctctgtggcccaggctggagtgcaatggtgcgatcttggctcactgcaacctccacctcccgggttcaagcaattctcctgcctcagcctccggagtagctgggactacaggcacgcaccatcacacccagctaatttttgtatttttagtagagacagggtttcaccatattggccaggctggtctcaaactcctgacctcgtgatccgcctgcctcggtctcccaaagtgctgggattacagaaatgagccactgtgcctggccctcagttcccttctttttaaagactgaataatatttcactgaatggctgttaaccatttattcaaccattcgctgatgggcatttactgttttcagtgttttgcaactaactaatcctacactgagcatccttagactgtacacctatccctatggatggctggttttatttccatgggatagatttctaagagtaggattgctcggttagagagtagatatgtgtttctttgttgttgttgttgtttgagacagagtctctgtcgcccaggctggagtgcagtggcgcaatctcagatcactgcaacctcagccttctgggttcaagtgattcccctgcctcagcctcccgagtagctgggattacaggcacatgtccccatgcctggctaactttttgtatttttactagagacggggtttcactgtgttaaccaggatggtctggatctcctgacctcgtgatctgcttgcctcggcctcccaaagtgctgggattacaggcctgagtcttttttaataattgtgtttccatgaatcctctatccatgacttcaccatttttccgtgaagtgtttgtctttttcttgttaacttgtaagatctttttgtatagtacagctgttaactcatggcttgccacctgcattacaacgtatttctaaatctactattttcctttttaaaagaaaattttcctaatgcctgtatttatgtcctgtttttccatccccaaaatgttttaacttttatacagtgaaatatttataccctttttttcctgttgtagcttctcgattttcaatcttggttaatattttcccactcttatacatcatacatgcgggcttctagattttcattagattttatgcatttagttttatatttaaatttttgatccagctggagtttatttttgcatatggtataagataaagctctaattttattttcttccatttggaaatccagctatggtaaaatcatttttattcttttcccacttaactgaacaaacccctgtgttatatattagaatttcagccaggcctggtggctcaagcctgtaatcccagctctttgggaggccaaggagggtggatcacttgagtccaggagtttgagatcagcctgggcaacatagtgaaaccttgtctctacaaaaaatataaaaatattagccgagggtggtggtgcagcacctgtagttccagctactagggagcctaaggtgggaggatcacctgaggtcggggctgcagagagcagagatcacgccacaataaggcaagtccatcctcattctctttttttttataccttaattgacactcactatcatatattaaaacttttttttttttttagctgagaatgattaggagagtggattgaaaggatttccctggtccagaaactggaattcagtggggcgccaccttagcacgggacccaaggggatacaggacaggatggaagggaggtcattcatcatatcttgttttaggtcctggggaccgaaagaggtccaacttggagcaggtacattggtctaagcctagttctgttcggttccggctcgacccccaagtacgtgaacgtggcccagggctgcaatgggaatgcttgggcagtcacctactctcctgccagggcaatgcagttgcctttaagcctctaccgccccctggtgctgtctgacctggggtttccagaaccaagctccctctcccagaagcctccagttcgaggaagaaggtcccttggggccaataggggtttaaagaagccgttggggacagagggtcttaacctgtaccatcgaatacctggtcagacaccagaaactgcttcaaacttactgtactcaaatctctcttatctccaccaacccttcttatttgctatgattttgagctactggtgggagctattcctgccttccctgatcacctacagagctgatcatctactgtggaagacaatacatcaattcctaagctatctgataagtgaacaatccaggagaggtccccacgtgctgccactgagtaggggacaatcggttctagttctaggggcaggaaagctcaacaggggcaggacagggaagggccgatggaagagatgggcttggagacagtccctggagaatggctccaatttggatcatcagggaaaggagaacatacatgaaaaagagggagtgaggaggatggtaggacttccatttcctgtaatgataggctaagttattcagaccaaccttcccattgaaaacaaatgcaaaagctggataaaggctttttaaaaaaaaaatcctcctctccctctccctctccctctccccacggtctccctctccctctctttccacagtctccctctccctctctttccacggtctccctctgatgccgagctgaagctggacggtgctgctgccatctcggctcactgcaacctccctgcctgattctcctgcctcagcctgcccagtgcctgcgattgcaggcgcgcgacgccacgcctgactggttttcgtatttttttggtggagacggggtttcgctgtgttggccgggctggtctccagctcctaaccgcgagtgatccgccagcctcggcctcccgaggtgccgggattgcagacggagtctcgttcactcagtgctcaatggtgcccaggctggagtgcagtggcgtgatcttggctcgctacaacctccacctcccagcagcctgccttggcctcccaaagtgccgagattgcagcctctgcctggccgccaccccgtctgggaagtgaggagcgtctccgcctggccgcccatcatctgggatgtgaggagcccctctgcctggctgcccagtctggagagtgaggagcgtctctgcccggccgccatcccatctaggaagtgaggagcgcctcttcccggccgccatcacatctgggaagtgaggagcatctctgcccggccacccatggtctgagaagtgaggagaccctctgcctggcaaccgccccgtctgagaagtgaggagtccctccacccggcagccgccccgtctgagaagtgaggagcccctccgcccagcagccaccccgtctgggaagtgaggagcgtctctgcccagcagccacctcgtccgggagggaggtggggggatcagccccccgcccagccagccgccccgtccgggaagtgaggggcgcctctgcccggccgcccctactgggaagtgaggagcccctctgcccggccagccgctccgtccgggagggaggtgggggggtcagccccccgcccggccagccgccccgtccgggaggtgaggggcgcctctgcccggccgcccctactgggaagtgaggagcccctctgcccggccagccgccccgtccgggagggaggtgggggggtcagccccctgcccggccagccgccccgtccgggagggaggtgggggggtcagccccccgcccggccagccgccccgtctgggacatgaggggcgcctctgcccggccgcccctactgggaagtgaggagtccctctgcccggccaccaccccgtccgggaggtgtacccaacagctcattgagaacgggccatgatgacaatggcagttttgtggaatagaaaggggaaaggtggggaaaagactgagaaatcgggtggttgctgtgtctgtgtagaaagaggtagacatgggagacttttcattttgttctgtactaagaaaaattcttctgccttgggatcctgttgatctgtgaccttacccccaaccctgtgctctctgaaacatgtgctgtatccactcagggttgaatggattaagggcggtgcaagatgtgctttgttaaacagatgcttgaaggcagcatgctccttaagagtcatcaccactccctaatctcaagtacccagggacacaaacactgtggaaggccgcagggtcctctgcctaggaaaaccagagacctttgttcacttgtttttctgctgacgttccctccactattgtcctgtgaccctgccaaatccccctctgcgagaaacacccaagaatgatcaattaaaaaaaaaaaatccttagcaatattacagatatttgacaagagagatgaatttccaggccaaaacttaaaggaaagtgggatcccagagaggcattggaagacagagcagaagaaattacccagaatgcagaaaagggacaaaaagaagagtttgagacacatggaggatacaatgaaagaatctaatatcgtttaatcagaattctagaaggaaaaaaaaaaaaagaagccaggcatggtggtgcatgcatacctttcatcccactatgtgagtattgcttgagccaggattttgaacccagcctgggcaaaacagcaagaccccattttattttatttaaaatactttttttttaaaggaaagaacaagagaatgtggcaaggtgaagatttgaaaagataatggctgagaatttcccaattctgatggagcatcaatccacaagttctggaagcgtgaagaattctaagcaggataaataaaatagaatctacatgcagatacatcacaatgaaatgtcagaattctgaatacagaaagaaaaaaaattttattttgagagaaagtctcactccatcacccaggttggagtgcagtggcgtgatctcagctcatgatctcagctcactgcaacctctgccttcaggttcaagagattctcctgcctcagcatcccgagtagctgggattacaggtgcccaccaccacatccagctaatttttgtatttttagtagtcacggggtttcactgtgttggccaggctggtcttgactcctgacctcgagtgatctacccaccatggcctcccaaagtgctaggtggcatgagccactgcgcctggcctgaatatagaaagaaaatcttaagagcagccttctcaacaacagcaataatggaagccataagccagtagaatgatatcttgaacatactgaaagaaaataacttccaacctagaattcaagagtaaatgttcttttcttttctttctttcttttttattttgagatggagtctttctctgtcacccaagctggagtgcaatgacatgatctcagctcaccgtaacctctgcctcccgggttcaagtggggcagcctactcctgccccagcctcccaagtagctgggattacaggcacccaccaccacgcccagctaatttttgtagagacggagtttcaccatgttgatcagtctggtctcgaactcctgaccctcaggtgatccacctgcctcggcctcccaaagtgctgttattacaggtgtgagccaccacacccagccaagactgaattttcaaacaagtaaaaactaaaacagtttgctatcagcctcactgaagtgcctcatgaaaaaaattctaaaggatgcaattcaggcagaaggaaagggatcccagatggaaggtctgagatgcaagaagggatgaggatttgtacacaaatgttcatggcagtatgattcataatagccaaaaagtggaagcaactcaatgtccatcaacagatgaatggataaacaaaatgtggtatatccatacaacggaatattatacagccataaagaggaatgaagtgttgatacatgttatgacatggatggactttgaaaacattatattaagtgaaagaatccagacacaaaaggccacatattacatgttccatttatgtgaaatgtccagagtaggcaaatccacagaaacagaaggtacacttgtggttgccagagagggggggaggagggaggaatggcaaataataggtacaggatttcttttgagagtgataaaaatgttacggaattagatagtggtaatggttgtacaaccttgtcaatatactaaaagccactgaatcgtacacttcaaatggtgaatattattattattattattattattattattattattttgagatggagtcttgctctgttgcccaggctggagtacagtggtgtgatctcagctcaatgcaagctctgcctctgggttcaagcaattctactgcatcagcctcccaagtagctggtgagaggtgacagcgtgctggccgtcctcacagccctcgcttgctctcggcgcctcctctgcctgggctcccactttggcggcacttgaggagcccttcagcccaccgctgcactgtgggagcccctttctgggctggccaaggccagagccagttccctcagcttgcagggaggtgtggagggagaggcgcgagcgggaaccggggctgggtgccgtgcttgcaggccagctggatgtccgggtgggcgtgggcttggtgggccctgcactcggagcagccggccggccctgccggccctgccggcccggggcaatgaggggtttagcacccgggccagcggctacggaggctgtacttggtccccaagcagtgccagctcaccggccctgggctcgatttctcacccggccttagctgccttcccgcggggcagggctcgggacctgcagcccaccatgtctgagcctcccaccccctccatgggctcctgtgcgcccgagcctccccgacgagtgccactccctgctccaccatgcccagtcccatcgaccacccaagggctgacgagtgggagcgcacggcgcgggactggcaggcagctccacctgcagccccggtgcaggatccactgggtgaagctagctgggctcctgagtctggtggggacgtggagaatctttacgtctagctcagggattgtaaatacaccaatcggcactctgtatctagctcaaggtttgtaagcacaccaatcagcaccctgtgtctagctcagggtttgtgagtgcaccagttgacactctgtatctagctgctctggtggggccttggagaacctttgtgtcatactccgtatctaactaatctgatagggacgtggagaacctttgtatctagctcagggattgtaaacgcaccaatcagtgccctgtcaaaacagaccactcagctctaccaatcagcaggacatgggtggggccagataagagaataaaagcaggctgcccgagccaagagtggcaacccacttgggtcctgttccacactgtggaagctttgttcttttgatttttgcaataaatcttgctactgctcactctttgggtccacactgcttttatgagctgtaacactcactgcaaaggtctgcagcttcactcctgaagccagcgagaccacgagcccaccgggaggaacgaacaacccagacgcgctgccttaagagctgtaacactcaccgggaaggtctgcagcttcactcctgagccagcgagaccacaaacccaccagaaggaagaaactcctaacacatccgaacatcagaaggaacaaactccagacgtgccaccttaagagctgtaacactcaccgtgagggtccgcggcttcattcttgaagtcagtgagaccaagaacccaccaattccagacacactgggattacaggtgtccaccactatgcccagctaattttttttttttttttttgtatttttagtagagacaaggtttcactttgttggccaggctggtctcgaactcctgatctcaagtaatcctcccaccttggcctctccgtgctgggattacaggtgtaagccaccatgcccagcctaaaatggtgaattacatcacaataaaaaaaataattttaaggccgggcatggtggtcacacctgtaatcccagcactttgggaggccaaggcggggggatcatgaggtcaagagattgagaccatcctggccaacatggtgaaactccatctctactaaaaatacaaaaattagctgggcctggtggcgcacacctgtagtccaagttactcgggaggctgaggcaggagaatcacttgaacctgggaggcagaggttgcagtgagctaagattgcgccactgcactccagcctggtgacagagtgagactccgtctcaaaataataataaccataataataattttaaaaagaaatgaagagtacagatatgtagatgaatctaaacaagtactgactacataaacagtagtaatggtgtccagtgaggttaaaaaaagaatgtacaacataaatgatgtaatgaagttagtgttctaggatccaagaggaaggtaagtaaaggaagtaagcgaactttaaacctcacctatctgtgacagtggaacctaggaaaggctgagttgtctaaggagtgtgggagagagccaggaacctcagcacacacctgagtcagcataaggaagtgcaaccagcagggaacaggacaggggcctcttccagcagggccattaacaggccaccggttttaccaccaccgtgaccctaggcctcttcctaagctccctgaaccttagcttctgtggtggacagatgtttctaccttctggcattcaccaccatcatgaaatcccctcccttgattgtgggtgggacccatgacttgctgcttttttttttttttttttgttaaaaagagatggggggtctcactattttgcccaggctagtcttgaactcctgaactcctgagttcaagcggtcctcctgtctccgcctcccaagtaactgggattataggcacatgccgccactgtgcctggctccatgacttgcttctaaccaatagaatatggcaaaagggatgagatgtcactcgatttcattacattttataagactccttgctggccaactcactctagagactctccttgctggcttagtgaagcgagcagccaggttgggtgtgatggttagtttcatgcatcaacctggctaggctgtaggtcccaattattctatcaaacactaatctaggtgttgctgtgatggtattttatagatgtggttaatagccacaatcagttgaccataaataaagattattttcaacaggctgggtgcagtggctcacacttgtaatctcagctgggagccgaggtgggaggatgccttgagcgcaggagttcaagaccagcctgggcaacacggcaaaacctcatctctgcaaaaaatacaaaagttagctaaatgtggtggtgtgcacctgtagtcccagctactcaggaggctgaggcaggaggatcaattaagcccaggaggtcaaggctgcagtgagccgtgatcacaccaatgcattccagcctgggtaacagaacgagactctgtctcaaaaaaaaaaaaaaaaaaagattattctcgactacggggatgggcctcatccaatcagttgaaaggactaaagaacaaaactaaagcttccctaagaaagggaagaggaagttctgccacaagactccagcatcagctcctgcctgagagtttccagtctgccagtctcctgtggatttcagacttgcgggcccctacagttgcataagccagttccttggaataaatgtcttgctgtgtttgtatgtttgcatcctactgtttctctgaaggaccccgactgataccttgggaaagcccacgtggaaaggattcactttcagttaacacccagcaagaagctggaacccttggtcctgtacccatgaggaaatgaattctgccaacaacttgaatgaatttggaagcacattttccagtcaaagctccagatgagaccatggtctagccaacaccttgaatgcagcctcacaagtccttgggtggagaacccagctaagccatgcctggacacttctccattagtcaaagaaggaaaataataatagtcgtctcacagggccattcttgggcttaagtgagacaatccaacagtgtgctcggcacagtgcatgccacatatctagttcctgacagggtgcaggacacagtaccccaaaacatggtaccttggcgatcactcttctaggtccaagcgatcctcccacctcagcctccagaggtcacactgaccttctctggcctttctgtgtgagcactatctataaaataattctctgacctatctcctctgaaattaggtcataagacccacatgcgacagatgttctgcaccatacctggggaatggtgggggaggaggttgaaggaaagtcatatagaggcacacgcacacaaaaagaacctgaaaagctgggcacggtggctcatgcctgtaatcccagcactttgggaggctgaggtgggcagatcatgaggtcaggagttgaagaccagcctgggcatcatggtaaaaccccgtctctacttaaaatacagaaattagctgggtgtggtggcgggtgcttgtaatcccagctactcaggaggctgaggcaagagaattgcttcaacccgggaggtggaggttgcagtgagccgagatcacgccactgcactccagcctgggtgacagagcaagactccgtctcgggaaaaaaaaaaaaaagaacctgaaaagataggtcttcctgagttctctcccagtttatttccatcagatcataccccttttcctctaatcatgtttttccacagctatccatttctttcttcagactcagcataaaaatatactattttccctaggtctttggtcttcatttctgaagcctcctatatcacataagactttggttaagtaaatttgttatgcttttattttgttaatctgtcttttattatagtggtgtcagctatgaaccttgtgatgggtgaagaaaagagatggctttttctccccgacatgcatgacaaaccaataaatgtcaaccctgactttttttttgagatggaggcttgctctgtcacccaggctggagtgcagtggtgcgatcttggctcactgcaacctcagccttccaggttccagcagttctccttccttggcttcctgagtagctgggattacaagcacatgccaccacgcccagcgaatttttttgtatttttagtagagacggggtttcaccatgttggccaggctggtttcgaactcctgacctcaagtgatctgcccgccttggcctcccaaagtgttggaattacaggcgtgagccactgcgcccagccagccctgacttaaaaaaaaaaaaaattctttaagccaggagctgtggctcatgcctgtaatctcagcactttgggaggctgaggcaggcagattgcttgagctcaggagttcgagacctgcctgaacagcatggcaaaaccctgtccctaaaaaaatacacaaattagccaggcatggtggcacacgcctgtagctactcgagtggctaaggcaggaggattgcttgagccagggaggtcaagggtgcagtgagccaagataatgccacttcacttcagcctgggcaatcaagcaagaccctgtctcaaaaaaaaaaaaaaaaattagcagcggtctgagaatcaggaacagaactaggaaggtctagattcatggagcacccaggacttaccatacctcatgtaaaggggaaaatggccttgattatttcagagaaatagtaggaagtggtggttttgtgtacacactctgcagtcatactggctcttctatgtcagctatgtcatgttatgctggtgatttaaatttctctgtgcctcagtttcctcatctgtaaaataatataaaattgcacctggcacatcatagggctatacaagcattagctgttattattatttgcctctaacccacagtcctataactccaaaggattacgagatgaaataaactcaatgtagtacacgttcatctacaccaactgtgagcaaataaagatgaaccaataggtggctacacttcaagacttgctcattttctataaacttcctatacttgttaagggattccaatcgtgtgatcctcctaggggtgcttgggaatgggaaggaccctatctggcacagaccttttcccgcacattttgtcacctgctcccactcgtgctgctgccccaggtccccatgtccagcagagggcgctgtggccctaaaatgcaatcctcagatgctcccctctcccgcgaggcctaccgctagcgagggaggccacccgccagaggcagcgggcctgactccaatcagaccctttgtcccaaccagcccttttctccaagcaatgagcttggagctccacatcacccgctgctcgctggcttttcaaacctcacgctgctccttgaagcgttttctgcaggctccagccctctagaccttccttctttgaaccccagaagcttcgctgcagcaatgaatcatccaggccttatgctgatgttagtttccaaattccgtggcagcccagctgtaaacctccatctcgccctacagagagcctcccgccacccacagcctgcgcctcttccatcctattccaacttctccagacaaaactcactggccccacccagctctcacttctgcctcaatcggctggagggcaaagcactatttttctcatttaatcttccagcaaacgattgtttggggcaagaggcctggcatggtggctcaggcctgtaatcccagcactttgggaggcaggaggatggcttaagcccaagagtttcaggccagcctgggcaatgtggtgagaccctcttttctacagacaacttaaaaattagccaggcatggtggcatgtgcctatagtctcagctattaaggaggctgaggtgggaggacctcttgagcccaggaggtggaggttgccgtgagctgagatcgtcccactgcacttcagcctgggtgatagaatgagagaccctgtcataaataaataaataaataaatgattgttttgggccaaggttagcatcctgcaaagatgaagacagccaacctttagtgagcacctactgtatgccaggcattgatctaagttctttacctaatcctcacagcaattctatgagagttgttaggcctgttttacagaggagacagttaaggcacagagtggttatgggacatgtctaaggtcacacagctagtgattgagccagtgttcaaacccaagcagtctgattccaacaatcgggctttttttttttttgagacagagcctcactctgttgcctaggctggagtgcaatggtgcagtctcagcgcactgcaacctctgcctcccgggttccagcgattctcctgcctcaggctcctgagtagctgggactgcaggtgcccaccacatgcctggcaatttttttgtatttttagtagagacagggtttcaccgtgttggccaggctggtctcgaactcctgacctcaggtgatctgcccgcctcagcctcccaaagtgctgggattacaggcgtaagccactgcgcccagccacccccagctaatttttgtatttttagtagagacggggttttgccatgttggccaggctggtctcgaacttctgacctcagctgatccacccacctcggccttccaaagtgctgggagtatagtctggtttctcttcagatcgtataaatctttcaccttttaccaaagtgctgggattacaggtgtgagtcaccatgcctggccaaacaactgggctttttaaacaagacattatctggacttaatgtaagtatagacacagggctccatccctgttctctagaactgtgctaatatactacccaccagccacatgactgtagagcacaggactaatccaagttgagatgtgctgaaagtgcaaaatacacactgaattctaaggactttttgaaaaaaatgtaaaatatagcattaacaacttttatattgattacacgtggaaatgatagtattttggatctattgggttaaataagatatattattaaaattaattttagccagacacgatggctcatgcctgtaatcccaacacttcgggaggccaagcgggcggatcgcttaaactcaggagttcgagaccagccggtgcaacatggtgaaaccctgtgtctacaaaaaatacaaaaattagctgggcatggtggcacacacctgcaatcccagctacttgtggggactgagggcgggggaggatcgcctgagtccaggaggttgaggctgcagtgaactgtgttcacaccactccactccagcttgggtgacaaagtgagaccctgtctcaaaaaattaattttcccatagctcacagtagcctcaaactcctgggctcaatctatcctcctgcctcagactcctcagtcattgggactaggactacaggtatgcatcactgtacccagctaacttttatgtaggtttttgtttgtttttaacaggtgagatctcactatgttgcccaggctggatagaacattttaaatggcatctgtgacttccatcttatttctgtggggcagagctgctctgggaactctcagctcagtggaagacagacaggatcatttgaatattctaaagcaggggaacatgtggtctgtgttttaagaagtgagaacaacttggtgtaggaacctcagaggcgggaactcctgagggagagagtttcagggaagctgtctcagcggattccaggttccagctgtatttctaaagatttgtgggactctgccctggggagaagagcagagggaaacacgaaggccaaaacagcaaaggccagggaggcaaggccagccagcagtggggctgggtgcccagtgctcctgggtgagtggagggagacaaggcctgctgaccacaaactgtgagggccttgactgtggggccagacagaggggctgtcagccagatggagctccagacaccttaggctagggagggtctggacctggacagactacagaaattggtgagcaggaatgggaggtggcagtgagtggcagggcccctggctcattctccctctgtcctcatttccttgctctggaggggagggtggtgaacaatcttctcagaggaggttagctgtgggaggacagctcctaaggagcatttcctgcctttggctcacaactgcttcctgtccagacctcccaacacttgacccccattcaattccttcctcccagggcagctgggtggccacgaggtcttcacaggtccagagacccggagcttctcagcaagctgaatgaggcagcgtcccaggggtccagaagcccagcctcgcccggcgctggtgaggaactggaatccaggcttgtactgaaagcctcagggatagatttggaggaggaagcccgagatggcgcctctctcccaccggctaggacctcagttcccactttcctagttacctcttccaccccctcacctccagctgggaacttacatcccttctttcatttatagggcacttttaggctgggtgcagtggttcacgcctgtaatcctagcactttgggaggccaaggcaggcggattgcttgagctcaggagttcgaggccagtctgggcaacatagtgagacctcgtctctatttttttaaatgaaatataaatattttaaaaattaaaaattcaaaaaaatgaaaaacaaatggcactttttcttcccaaacaatggctggggacttctgaagggaaagggaggcaaattccctaggaaataatcatgagtgattacttctccagaaacacctgaggcctccaatgaaccccttctttgagagtcaatctgcagttttctccctggttctgagatgtcaggccaggttccaaagatgtgaggtttttttttttttttttgagacggagtctcgctctgtcgcccagcctcgagtgcagtggcgcgatctcagctcactgcaagctctgcctcccgggttcataccattctcctgcctcagcctcctgagtagctgggactacaggtgcccaacaccatgcccggctaatttctttgtatttttagtagagtcggggtttcaccatgttagccaggatggtctcgatctcctgacctcgtgatccacccgcctcggcctcccaaagtgctgggattacaggcgtgagccaccacgccagcctaagatgtgagttttgagagcccatcacaggttgttaaaagtgtgtctggagttggttccttcccatgggttcttggtcttacaggcttcttgggttcttggtctcacagacttcaagaatgaagccgtggaccttcgcagtgagtgtcacagctcttcaagatggcatggacccaaagagtgagcagcagcaagatttattgggaaaagcgaaagaacaaagcttccaaagcagggaaggggacccaagcgggttgggtctcctggctgggagtgggggtggggatggggggagtggccagcttttattcctttatttgtccctgcccacatcctgctgattggtccattttacagagtgctgattggtctattttacagagtgctgattgctgcattcacaatcctgtagctagacacagagcactgattggtgcgtttttacagagtgctgattggtgcatttacaatcctttagctagccaagaaattctccaagcccccactccacccagaaagtccagctagcttcacctctcaaaaggagccagatctttctcctttatctcttaaacctaagccatgcctgcccaccccctagtgcagggtacactacaatacttaaaatggggagaggactaccccaaataacccagcccatctcagctcaaccatgagcctctgctatgcctctaaatcagtcctgccctcttccttccataaatcctagagacccctaggagatgcccctcaccagcagcataccagccaggaatccctgagtcctccataaaagccacacttggagctgagatgaccctaggggagggggcttagtccctctgccttgctctgccccttaaccaccaggtagaccacaagtgtttgttgcacatcataccccactccccacagacccccacttaaggccagggcagaattaaaggatggaattgctgaaagaaggggtcttctcccccagggatgcttggtctcagtccacagggaaaggaaggtcctacgggtgtggggagtgcaggcctggctggtcccctgctctctgccagctctagagcacccgctgtaccgggggctccccttggtggggtcaggaaaagtccacgggagacttgggggagtggaggggagggccctggggaaaattaatgtggatcaagggcttgaagacgttcctgactctccctcccctcccctacccccacccccacgcccgcctcaggtggaccaaatactgaggagtggatttgtgtgagcctaaacacaagagctctggggttctatttcctcttagtcattttccaaagctgcaccaccctaccactgcctggctggtgtggcatcagagggctctaggtccccagccctgcagagaagcccttctgaatgaaggagaggcccaccagcctggggagaagaggtgagtccccgactccctccgagacagagcctcctccccttctcaagcaccccgaatctctgcaccaccaattcaccctcagatctgtttctttctttttttgttttgttttttgttttgttttgttttgttttgtttcccccgtcgcccaggctggagtgcagtggcacgatctcggctcattacaacctctgccttccaggttcaagcgattctcctgcctcagcctcccaagtagctgggattacaggtgtgcgccaccatgcctggctaatttttgtatttttagtagagacggggtttcaccgtgttggccaggctggtctcgaactcctgacctcatgatccgcccgcttcggcctccccaagtgctgggattacaggcgtgagccccaggtctctttcttaaaatgtcttttccctctatctttcccctcccagtgatccaaaagctacgcctgatttggagagggggtggcaagtgggaaaggaggagggaaggggcagtgtggatcgaggagggggtcacccccaccctgaccctgagcaccctaggtttggcccctctgggtgcctccctctttggagaactcaggaagccgatgagctagtttgcgagctgggggtggggcagtgaggagactggggaggagggaggagaggggagagtgatgggagccgcggctgggaggcttcggaaggttgaaggctgggtttgggaggtgagggcgagcgtccctctcagccccgtggggggatatgcaaagaattgctaattgcaactaaacgaggcctcggcgtgggggaaggggcagtcttgcggctgtcaggggctaccgcctctttgagtgcccgggtaaggccaggccagcccgctcttctcatgtaaagcagctttttgtctgggggagccagggctggggccaggggctggggaaggggcccaagccatcagcaagtttcttgttccccagaaagggagaagggtgccgaggcctcctcagagtgagaatgcccccctccttctccactctcaagctttttatgtgggggttgatggggtgctgcccagcaggagggggtgggcctgggatcccagtaccccccttgctggactgtgggaaaaaaaagagcacaaagaagggggctggccccgctgagatgggagacggggcagctctgatccacggatgccctgaggctgaagtacccatccctggatccccttctagagaatgtccccattggccatgtatcttatctggtcatctgggcccatttcagactttctcacccactttgcaaaccctccctaacctttgtactctgaggagatggattttgtgaatccaagttagttcctaactgagcctaactagagggagaagaaggactcatacctttggggaaatctttgctctaaacatagggacctacgaataatgcttccagaccctggggccacataacctgttagagacccaagaatcttgctttctaattcagatgcccccttttatgagcttctataaacttgggcaaattatatcagctattgagcctcagttttctcatctgtaaaatggggacaatatcatcctctcaaaatccttgtgaagatatggaaagatgcaacgcatcccgtatggcagtccctggttctcagtgtgtcccctcccctcccctggaacatctatcaaaaggatggatacacacacacaagcacttcagggatagtgatacctcatgtccatatcacactttgcaatttccacaatgcacgtgacatctctttctcttttttcttctttttgagacagaatctcactttgtcgcccaggctggagtgcagtggcatgatctcggctcactgcgaactccgtctcctgggttcaagtgattctcttgcctcagcctcctgagtagctaggactaccacccaccaccactcctggctaatttttgtatttttagtagagacgggttttcaccatgttggccaggctggtctcaaactcctgaccatcagtgatccacccgcctcagcctcccaaaatgctgggattacaggcgtgagccacaacgctgggccacatgtcatctcttaatgatacactatctaatcaatggaacagactcttcttttctatatttggtgaaaaaaatcaagattccaagagcttaagtcagatcccctgacacctctgccaatgctcatcccactccatggtgtggcctcagggatcccatctcacagactagacaaatggagcccaaggccagagcaaaaccagccggagactgtcaccgtccaaggtatcacccagggtttctcaatagcacagcttgtcttagtggccacctgcactcttctcctaaatcagtgcttgtgtggaaactttaggaccatgtgggtccccttctctcagctccacactggggtccttgagaagcagagggctggctggaggataggaagggttgtcccctcccctcccagcagaaaacctctgggatgacaccttcactctgagaggcagcgggatgacacggatagaatcgctgggcaagtcagttctttccctcctcccttttcctgctagaagtccacttcttcatcgagaaatgtctcctccgttccttcccccctctattttgggggccccggggtctagctccccatccctgtgtgtcgctccggctggatccccatcctcccagcccctcggccaagtggaggatgctgatctgactgcctcctgccagacacctagggcctcctgctcccagagggtcttggccaaggggctctggcgctgggccggtgcctttctcactgcccggctccctcctcacaggcccctaatccatctcacccagcaggaagcccttaagctgccttttcagccgccttccccagcccgctgtgggctctgtgcctttctataccacccttggcaggagctgtgttatacaagctggagagagaggcccctgcaaagaggtcatcgtgcctaaggcggcttccagctccagcagcctctcctccctggtcccctccccagggttcccccactggtacactgcctggcatccctgggcactgacagccctggctgactcacatcaaagccccagactgggtccaggtgagaggagggatgctagggggacagtgggcagaaggccagggtctggggaagtgtggcaggcatgaggggctcctctggctctgtgccatctgtccttttggctggtgtctccatcttccctctgcttccaacccctgccctcaactccccaaagcccattcacaggtttcttagactcagttatgcagcccagacagggctgggagagcgtgtgccctggaggccacctcaactgaatgtttcagacaggaagagagagaggccaagggggtgggggtgggggcaggggcgccaacagtttctttctgtcttcctaggttgtatttggatttgggcaattgcttgtcactcttggggcacagacctcatagcttggatcattctggggcaggcttaatttcacacccccaatttcatagcccctgcaagtatactctcgctggttctgatgatttttggtttggaaaatggttctttttttttttagatggagtctcgctctgtcgcccaggctggagtgcagtggcatgatctcggctcactgcaacttctgcctcctgggttcaagtgattcttgtgcctcagcctcccaaacagctggaactacaggcacctgtcaccacacctggctaattttgtattttcagtagagacggggtttcaccatgttggccaggctggtctcaaactcctagcctcaagtgatctgctcaccttggcctcccaaagtgctgagccaccgtgccctgcctggaaaatggttcttgtatgacctggtccttatcttgacctcaacctttccctcccctctctctccaggaaaaaatatccccccaccgcccctacctaggccccttctccaaggcccaaaccccagtcctgcctccactccaggaagccagccttttgctggctagaagtggttagagaagagttgggggtgcctctgggaggtctgtttgtagttcagattcttctcattccaggctcagcaggctctctctaagggaagggcctgggatggggggcggggatccttggggcaccagctgcagggaaggaaagcttcccggggagaggagggaagtgtttttcttcccttcctagtgacccccatccacaaggtaggaactgcctctcctggttccatcattggagtcccccccacaagctgccccagcattcaggctcctcccaaggggcctgacaggagctatggagagctgcggccctgatctctttcttcacttctgaatgagtccatttctacccttttgggacccttagagatgtttggaagagtttggaggaggggcactaaggtatgcacaaccagatgcttgcagagtgactgggtcagccccagcttcaaagaggctatatcagtctatccccaaaactgaagtcccttgtagattttttctttctttaaccagtattcacatatttgtccctctagactaccaacccttaggcctcgagattcctcaaggattaatcagtgatccagtcacgggagaaagcaaccaacccccagggtcttagaagtctgacacctgccccaactccccagcaaacttccttctccagctgcctctgcctgagagcaggaaaaaccaacactaaaggcttatattgagcatccactatgtgaagtcacttaccacttcatcttatcttccccacccttcaagagaagattagtgtccctatcttatcgatgaagagtcagagcttcagaaagggagagtgacctatctcagggaatgcagtgaggaagcagagctgaatccattgagtccaagtccaggacagtggtctgcctagcatgctgcctcgtgactaggtctgccctaggtgcctgtgtccaggctcccaggctgacctctggctaatattctgcttctgggttacaaagcagcatgtaccatctgagcttcctttcccaaagcaactgtccctacaaatccagtttctctttcagtcctcacttcacagggaacaggacagacttattgtgcccattcttcagatggagaaactgatactcagagaaaagattcactgaaggtcagaaaagtattaagcaccaagaccaggacacgagcattcaggtgtcctacgtccacttcatgggttctcacgatgatgtcagatttatttgtcacttcaccccttctcagattggagatcagaatagatttgtttttgtttgttttgttttgagacaggatcttgctctggcacccaggctggagtgcagtgctgcaatcacagctcgctgcagcttcgacctcctgggctcaagaggtcctcctgcctcagccttcccagtagctgggattatgggtgtacattaccatgctcagctaatttttttttttttgtagagacagggcatatttgtaattaaatgtggctttgagaaactagatacttgtcaaaactggagactagaaatctgcgtcctagaaaccttgctcatttttcatcctcagagctgagcttctcccctccctaagtgtgggtttcagaggcagggcagaatgtatggaaagggaattgggctcgctgtccagggcaggatgcttgtgtctctagattacccagctcagggagttcttcagaccttgccctatttacagagagcattgattcatttaacaattttttcttgggtgcctatgatatgcaaggcactaaggtatgcacaaaaactaagacacagcctctgccctcaagagattatcttgttgggctgtggggaggctgtagttagacatatgtaggtaacacatgccacatgctaaatgccataagataaacatcaactcagggaaaggacaggggtggtatcagggaagcaccacagagaaggggacttcaaggatttacagtggtggaatggctctaggtattttatcaaaaaaagagattcaggccaggtgcagtgactcatgcctgtaatcccaacagtctgggaggccgaggcaggcagattgcttgagctcaggagttccagaccagcctgggcaacatggtgaaaccccatctctacccaaaatagaaaaaattagccaggcatgtgtctgtgctcctagctactcaggaggccaagatgggaggattgcttgatcctgggaggtcgaggctgcagtgagccgagatcgcatcactgcacattccagcctgggtgacagagtaagactccgtctcaaaaaaaaaaaaaaagatgcaatacatatagacgaaattaaattatggccccacaaaattaatatgttaaagccctaaccctcaatgtgattgtatttggagataggggttttaggaggtaattaatgttaaacgaggttggagggtccccacccctaatctgataggattggtggccttataaggggaacagagagaaacctctctctccccacctacacacaccaatgataggccacatgaacactgagaaggtggccatctacaagccaggaaggaagccttcgccagaatccaaccatgctggcatcccgatctcagactttcagcttccagaactatgagaaaataaatttctgtcatttaagctatccaatctgtagtattttgttatggagcccaagcagactaaaacaagcaggaaactaggtgtttgtgaaacttggatggcctggaggagtagactttgtcacgaagccacagaaatgaccctccagtagaagctgctacctctgccactagcaggtagggggatcaagaggctaccattgggaccggttgcagtggctcatgcctgtaatcccagcactttgggaggccaaagcaggcagatcacttgaggtcaggagtttgagaccagcctggccaacgtggcaaaaccctgtctctactaaacaaacaaaaattagctgggtgtgatggtgcacacctgtaatcccagctactcaggaagctgaggcctgagaatcgcttgagcccgcgagtgggaagttgcagtgagccaagttcacaccattgtattccagcctgggggacagagtgaaactctatcaaaaaaaaaaaaaaaaaaaaaaaaggcttccattgtaattaagccaaggtaactgcacctagggatcactagaaattgccactgcagcaagaacatgacctcatttcccttccaccttccaaatctcaaataagcgtattttgcatccagagctctagctgcaagggaggctgagaggtgaggtttttggcttccaacctctgcagtataggaaggtggtgggaatggtgggaggatctcttgagcccaggagtttgaggctgcagcgagctgtgatcgtgccactatacttcagcctgggtgaccgaacaagacctcatctggaagagaaaaaaaaaaaaaaagtaactagggctctgaaagctaattgaatggtctggaggtttggaaagcagatagctttagagtgaacgtacgaatcacttggggatggtatatttggataagtgggcagggcccaggaatctatattcctaacaggcaaaccccagttcccatttcccctcctgccataatggactcagcatgtggactgatgcatgtggactcagctttcagaaactttatccctgggcaggagctctgatggggcagtcccagacactacagtgagcagtgaaaggttagatttgagcagtgaaaggttagcagtgagcagaaaaggctagatttgtgctgaattagtccctttctctcctaagagctagtcctgaaagttggatgctgaaccctgaaaaatgctgctgtgatggaggctcaggagaaggggggggtctgcctagaacccaggagtccagggatttaaactcaccaccccaccaaggaggactggatggagtcagctgacaacatgaataagcatttcctgaagttatgactcattttgttctgaatttctaccctggccccgggggtttaggaccttcgggatcctatttctattgcaggggtttggttagagagccccttcaaccttgaggggtttaagaattggacagaggagaagaaaagtaaaacagagggtacaagagaggaagggaggagaaaggtagcacttccacccaaaatggcctcaagtccctaccagaacccaatgtcctccatagctcacattgaatttcaacacaaaatagtctattacaatagatgttcctttttccttctcagtcattttcttttcttggctcttaccaggcagccttggaccctaagccccccagttctgaggggaaggccatagataaatgaaaaagccctggccttcttcctctgtgcccccatcccagccccacatctcagggagggggtcgccccaagccagagcagggctgagtctgcctgggccaggctgcctggccaataggctttcctccttcccaggggtatccattctcctacccagttcctgagatgctgggcccccttcagccgcatctgcagcctgactgagcagagtcccccaggccttcttcctctaggctggtcctcccaggttaagagcaggcttccatgttggaagggggtccgtccccccttcccccagttatcaccacaaagcaaagtccagggaaggagggggagtgggcaagggtgggggtagtgggagagccaggtccttgctagtaaatcaaagttggtttcccagatggagttgcagccgctttgatttctcaagtcacccccctccccctctgctgcctcccctcacccccagctccacagtttcaattcctccctgaaaagcagcagggcctcctttcaaaccagcccagctcctccaactcccaacaacagcttcagttacaggaaaggggaaggggagggggtgaggtggcccagcctagagagaaaggagagacattctgggagaagcaagagggagaaggaggagtagaaaatgaggaagggggaaaagaaagagcagagtgagaagatgggaggggggcagccagggtggaagagtggggctctgctggagcaggaggggagctccagctgggaagccaacctaccttttcctccctcccaagggagcacccccacacccatcaccccaaggacccctccatagctacagagctatgattcaggcttccctattcctctccccttggcattaggttctagaaggttctggaagacaaaatatcgaaaccgttcattcctagggacatttatttcctgttctagaaggcagagtcacccaagaacctcactagccaaacctagcactggctttctagatcctgtttccccatttggctctgagcagcccacaccttggtcttgctcagcccaggcttgggccaatgaaggcccttaattaatagatcatctgttacatctgtttaatccttttatggcccattttgcctgccagagaccttgaagaaagacattggagagataaaggggtaacagctatgctctgctaagtctccttcctcctctgccccaaagccaggggcagccttggaacttggcaggggtggggcagggtgcactgaaggaacctacaagttgtcaggaattggaattccaggagtcctaggtctcctgattatttggtggcccatttctttatttccttcttccttccttccttccttccttccttccttccttccttccttccctcccttccttcctttctctttctccctctttctctttctcctctctctctgtctctcttacttttatttctctctccttctctttttttctttctttttgagatagtgtctcactcccgttgcccaggccagagtgcagtggcaggatcacagctcactgcagcctccactcaggtgatccttccacttcagcctcctgagtagctgggaccataggcatgcaccaccacaccaggctatttttatttttaagatttttaaatttttagtagagacagttttgtcatgttgcctaggctggtctccaactcctaggctccagtgattcaccagcctcatctttccaaagtgctgggattactactgtgcccggtctgtggcccatttctaagggtcatttccctgagatctaaatggaggatggagtgcagggagaaggaatttgatacctcacctgaaggtggattcaaggtcttgatggacaggttcagggagagaggaggaaaggtgaattcacctaaagcagaggcatattgtgtgggtcaggggagaggggagccaaggagactgattctctgaatgctcagacctgttttccacaaagtatctaggacccaccccgtttagagcagaacatttttgcttagagaataaaaccattgaggctcctaaagtatctgaaattaagtcctcctccttgatctctgtctcctaaacagatacacatagcccttccctctttagggtggagggacctcagtgctttgaaaaggaaagaacactgacccagaattgaggaaacaaagaggggacctgtcctctggcaggctcattggagcagggggaattccctcgggagtcaccataccaggcattgtcccttagattagccctcaaggacagaggggacagcttctctggaaagcaagggctctagaggaaaacgtgcaaggagacctggacatgtgtgattacctaaactgtgacgggggaaggtgaaaggccagagacaggaggatattttgcggggagtgggagccctaggcaatctccccaggtttccttagcggggagaagttctccgtgctctcctctcctgagcatgcctgtgtgtgttggatgttgctgactgtcatttcacttatctgtgacacacaagtctttcatcttgtttgggtggcatgaagcaaggagagtttcaatgatccaagcatcatattctcacagcctcctacatctggctcaagggtaaaatcaataaattgttttatgatccctttctactgatgaaaaagctgcagctaaggaagggatggtgacttgcctaagctactgggccagtggggctggagccaggcctgcagcccagacatttggagccccagaccaggtttctttccactccaacagctattttctctgctctcctgttaggttgagatttctgctcctgccaagcccatcctacagaacgggggaatggaccctgcagcagatttacagtaggtacccaacaattatcccagatatcagatttggttttttttttgtttgtttgttttttgagatgggttctcactctgttgtccaggctggagtgcggtggggtgatcacagcttatgcagcctcaaacttctgggctcaagtgatccacccgcttcagcctcctgagtagctgcgactacaggtgcatgctaccacaccagactaattttaaaattttctgtagagatagggcctggctatcttgcctaggctggctcaagcaattctcccaccttagcctcctaaagtgctaggattacaggtgtgaaccactccacctggtcctagatgtcagatttgtaagcagacacgattaacagtggtacttcggggtttgggggagaagtggcacttctgtgcactggggacacctaggctcccagcccacagcagaagcccaagactaaagagaaatgttccttagggagcgatagcagaatgtggccccctagactgtaggctccctgaagctggaggctgagtctctgcagactatctgctttgcatgtagtagatgctcaataatttattggataaaataatagctactattaccaagcttttagtctagcaccaggtcatagtgagtgtcatatgctgtctcatttaattctcacaactgaaataagaaaaataaaaattctgggccaggtgcggtggctcacacctgttatcccagcactttgggaggctgaggtgggcagatcacttgaggtcaggagttcaagaccaacctggccaacatggtgaaaccctgtctctactgaaaatacaaaaattagccgggcatggtggcttacgcctgtaatcctagcactttgggaggctgaggcgggcggatcacgaggtcaggagatcgagaccatcctggctaacatggtgaaaccccatttctactaaaaatacaaaaaaattagccgggcatggtggtgggcacctgtagtcccagctattcaggaggctgaggcaggagaatggcgtgaatccaggaggcggagcttgcagtgagctgagatggagccactgcactccagcctgggggacagagcgagactccatctcaaaaaaaaaaaaaaattagctgggcatggtggtggacacctgtaatcccaactactcaaggaaggagaatcccttgaaccagggaggcagaggttgcaatgagtgagatcgagccactgcactccagcctgggcaatggagcaagaccctgtctcaaaaacaaaaacaaagaaagaaaacaaaaacctgacttgaagctctcagacccagaagaaacaaaccttgtgacatcctcatgttggctagaatctctgctggcccaaacacctcttctcagtctccttccttattggccccagggcctttaaatgttgacatccccaaagctttggccttcccaccctatccatcttccctaggtgatcttagccatgctcataccatcagacataggctgaaggtgccagatctaaatctagcccagagttctgacctgagcactgagttagattattcgcctgccttctggacaccttctcttggatgtgccataggaccaggcttgcatgactgcactcattatctgccctttccctgcatttcccagcctggttaatagcattagggcacctaggtcagagccttggttgatctcgtcccttactctctctccttaccatctgcactgtcacatctcagttcctgccgtcaccatttcttgcctggtctcttgtgatcaatctgtaactggtatctcaggctcccggcatgatgctcctcaaaactgcccaaatgcactagttaaaatgcaaatgtgacctcttcctttcccaaaattctccagtatatcctcatctccaggagcccagaccgtgtgcaaggtatccaagatctctgactacttaaagcctcctctgccgtcgttctcctagatgcacgtgggactctcacagggccaaagtcttgcgctgcctccctactccatctatttcaccccaccacgcccttgcacacaatgttccctctgtctggaatgcctgtccctcccttgtctgtttacatgtctgtttccctgttagattgtgagttcatgtttctacatccaacacctcacacgtgatctgtgaggccctgcaactctgatccctgctggcctctttacctcgtcctactttgctcctcactccaaccacacagcctctcttgccctccccgactcagtcagattccctccccaattatgctttcaaagaactacggatcttcccttcacagcactgaatcccatggcacttttacatccatgtcagtgactgtgcagtcaacgtgagtgtctcccactaggacatgagctccataggaacaaagggttgggtctggtattcagtgtaattttttttttttttaagagatgaggccgggcatggtggctcacacctgtaatcccagcactttgggaggtcgaggtgggcagatcatgaggtcaggagtttgagaccagctttgccaatatagtgaaactccgtctctactaaaaatacaaaaattagctgggtgtggtggtgcgcgcctgtaatcccagctactcaggaggctgaggtaggagaatcgcttgaacccaggaggtggaggttgcagtgagctgagatcgcaccactgtacttggcgacagagtgagactctgtctcaaaaaaaaaaaaaaaaaaaaaaaagaaatgagttctggctatgttgcccaggctggttccaaactcctgacctcaagtgaccctcctgcctcagcctcccaaagtggaattacaagcatgagccaccgtgcctggccataaatttgttaagtgaataagagcacacaattcttacagatattaggggctatgtgatgcaggagacagaacacagctttaagagccaaacaggcctgggttttaatctcacccctgccacatactatgtgactttgggaaagttgccagatctcacctaaggtggattcttcatctataaacaaaaaacaatacccactttgtaggcatatacatgtgcagaacttagcaggagctcaaaaaatggtagcaattggccgggcgcagtggctcacgcctgtaatcccagcactttgagaggccgaggtgggtggatcacaaggtcaggagttcgagaccagcctgaccaacatggtgaaaccctgtctctactaataatacaaaaattagccaggcatggtggtgcccggctgtaatccctgctacttgggaggctgagagaggagaattgcttgaacctgggaggtgaaggttgcagtgagccaagattgtgccactgtactccagcctgggcgacagagcgagactccgtctaaaaaaaaaagggtagccattaccctaggtctcccaggatgcctgctgaataaatatttaattcaacgtaacttcttgttttaaaaggcgctttatgattatgaaatgtatttttgtcattctgaaattattttggatgtggagtctcacatttttaaaatctgttggtttcctacttggcagatgggaaaactgaggttcaaagaagtaaagtgactgttccaaggctgtatagttagtggcagagttacaaatgggtccaagtcaatgaccaagctaatttatttatttatttagaggtctcactctgttgcctgggctggagcacagtggcatgatgacagctcactgtagcctcaacctcctgggctcaagcaattctcccacctcagcctcccaagtagctgggaccacaggcatgcaccaccatgcccagctaatgttttaaaatttttgtagagacaggggtctcacttcttgtcccagctggtctcaaatctggcttcaagcaatcctcctgccttggcctctcaaagtgctgggattaaaggcatgagccattgcatcctgcccaagctaatttttaaaaactcagaaataaatgctgtatctatcaaataacaaattacatcctttagttacagggctcctgtactcaagaggcaggttggcagaatgagaagtgctgtaggtaggcctgtaatctgaagatgcaggttctggtcctgttcacactcaggtccctcacgtgaaaggcaagagtaaacatgaaataccgtgatttctccttatttcatgtacaaatgctagacaagtgtaacatctttgtggaatcacttttcttctgggctactataaactcttttttttttttttttttgagacagagtctcgctgtgttgcccaggctggagtgcagtggcgcgacctcagctcacttcagcctccgactcccgggttcaagcctcagctcctgcctcagcctcctgagtagctgggactacaggcatgcaccaccatgcccagctaatttttgtattttttgtagagacggggtttcactatgttggccaggctggtctcaaactcctgatctcaggtgattgcccgccttggcctccaaaagtgctggattataggcatgagccactgcccccggcctactataaatttttgaagggcagatgctgtcatctttttccacattctccatagcccctattatggtggtttgaaataagaaaaaaagtgtgttgaaggaatgaaaggttgcctgagtgaatggaagaatgtcctctatttcctgtttccagctccccagctccccatctgccttggggtggctgggaggggataactgtcattcagacctggccctaggccaggaaaacgggtttgtcatggaaggaaattgaagatgctgcgtttacattggagatttgctctcaatttcctatcggactgcgagcttcctgaatggggtataggagcctgtcattcatttttgtttccactgctcagcttccatgtttggtaccggctctcaagatgctttgagatggactaggcaggagatctgaggatcaaaagctcaggctcaaatggagcagagagagcacaacattcccatccttagactgctctgagagaaaatgggcttgctggtggaatagagatgggtgggctggaaatgggatgcacaaaaaaaggcatatccccctcgacacccactcatgccccaattttgaaggaaaattttcatcctggtgtagggaaaaggcaaattccccaggatgtaataaggaacattttcaagttgtaagaaaccggaacatctttatatcattcattcgatcaggaaaaaaaaatttttttttgaatcctgtcaaacctggatccctttgtatccatctacttagaatattttttccttctccctactcctttcctctttttgttatttttcttcttctgctgttgttgtttaaaacaattcttttctatattggagcaagaaacatttcaccagactgtgaggatttggcccatactgtgaagcaaaggggctttctaaactcaattttctttcttctttttaagtcccccctttcccctgtccctcgggagagacaacagaaaataattgatccatcatccagtatcaggcccaggagatttacatgcaaattcctcctcgacccctttccaaatttaaaatcctagaagggaaaagaaaaattctaaaagtagcaggaaccctgctggccacaccccaccccttaccaggtgagagatgtggaggggataattcaccacaaccccccagtttcctcccgcgtcacacacgccacccctctctggtgtggaaccacttaagatttgggtaaaactcccctctcgccctggagacgggatctggaagcttttagggggcggaggtagaggtggggaggcagaaggaaaattccctcaaacgttcgtcaggcctaagagagtcgtcccttcactcaaaattgcccgtcaccccccgccccccaccattaactttcgattaagacctcctccttagggcaactaaactttactttgcacaattaagatttgccgcagaagaagcgggagggagaagccgcagctccgggccattctcctttccctcgctccctccaagccccccgccccaaccctccagctccgggcctccgagttcctgagttttctcactttgaggtgccaccgaacacaaagaaccataatgggctcctttgtgttggctacggggcaattacgcctcggagtcctggtccctttaagagtctcttaaagagacaggatcccatttttcagagggttttttaagggtgtgtggagggggagggcgagggatctacgtgtaaagtgaagtgaaactttcgcctgggctccagaaagagcggacagaaaaggtctttgtaaattgttagtttttttaaagtctgttttaatttttaaatttgagatttttcactcgatttgaaaaattggactaggaataggtggggttcgaggatcgggggcgggggcaagggtttaaagagtccccacccggcagagcacctcggcccgggaagaggagtgagccagggtcgagtagtgtcccccgatctcgccgcggcaactccggagaaatcccgggctgggcaaacagcccttaatataataatagcttgtctctttaaaaagcaaaagggggggaaagttttgttggcatctggtttctgatctcattatgttgtggtcgaccaatccagccctcgggcctggtcctcgggtttaaatctgattggccgagagcacattttgggttggtgcttagagctcgacggggcggtttcaaggatcccttttttggggggctgaggagagggcggggccgccagcgggggcccccttgaaaccgactaattgggatcggagaggccgaggtgagggctggaggaggcacaaagaagtcgctgggtgcagaagggaggggagagggggagctgagaggcgagaggaggaggaagaggagagagggcagcagcgcgcggtgtctccggctgctcagtccgaccgcggcaagcaagcgggcaggcgcaccgccccctcccccgcccggcctccccaactctgcggccgcgagtaaagtttgcaaagaggcgcgggaggcggcagccgcagcgaggaggcggcggggaagaagcgcagtctccgggttgggggcgggggcggggggggcgccaaggagccgggtggggggcggcggccagcatgcggccccgcagcgccctgccccgcctgctgctgccgctgctgctgctgcccgccgccgggccggcccagttccacggggagaagggcatctccatcccggaccacggcttctgccagcccatctccatcccgctgtgcacggacatcgcctacaaccagaccatcatgcccaaccttctgggccacacgaaccaggaggacgcaggcctagaggtgcaccagttctatccgctggtgaaggtgcagtgctcgcccgaactgcgcttcttcctgtgctccatgtacgcacccgtgtgcaccgtgctggaacaggccatcccgccgtgccgctctatctgtgagcgcgcgcgccagggctgcgaagccctcatgaacaagttcggttttcagtggcccgagcgcctgcgctgcgagcacttcccgcgccacggcgccgagcagatctgcgtcggccagaaccactccgaggacggagctcccgcgctactcaccaccgcgccgccgccgggactgcagccgggtgccgggggcaccccgggtggcccgggcggcggcggcgctcccccgcgctacgccacgctggagcaccccttccactgcccgcgcgtcctcaaggtgccatcctatctcagctacaagtttctgggcgagcgtgattgtgctgcgccctgcgaacctgcgcggcccgatggttccatgttcttctcacaggaggagacgcgtttcgcgcgcctctggatcctcacctggtcggtgctgtgctgcgcttccaccttcttcactgtcaccacgtacttggtagacatgcagcgcttccgctacccagagcggcctatcatttttctgtcgggctgctacaccatggtgtcggtggcctacatcgcgggcttcgtgctccaggagcgcgtggtgtgcaacgagcgcttctccgaggacggttaccgcacggtggtgcagggcaccaagaaggagggctgcaccatcctcttcatgatgctctacttcttcagcatggccagctccatctggtgggtcatcctgtcgctcacctggttcctggcagccggcatgaagtggggccacgaggccatcgaggccaactctcagtacttccacctggccgcctgggccgtgccggccgtcaagaccatcaccatcctggccatgggccagatcgacggcgacctgctgagcggcgtgtgcttcgtaggcctcaacagcctggacccgctgcggggcttcgtgctagcgccgctcttcgtgtacctgttcatcggcacgtccttcctcctggccggcttcgtgtcgctcttccgcatccgcaccatcatgaagcacgacggcaccaagaccgaaaagctggagcggctcatggtgcgcatcggcgtcttctccgtgctctacacagtgcccgccaccatcgtcatcgcttgctacttctacgagcaggccttccgcgagcactgggagcgctcgtgggtgagccagcactgcaagagcctggccatcccgtgcccggcgcactacacgccgcgcatgtcgcccgacttcacggtctacatgatcaaatacctcatgacgctcatcgtgggcatcacgtcgggcttctggatctggtcgggcaagacgctgcactcgtggaggaagttctacactcgcctcaccaacagccgacacggtgagaccaccgtgtgagggacgcccccaggccggaaccgcgcggcgctttcctccgcccggggtggggcccctacagactccgtattttatttttttaaataaaaaacgatcgaaaccatttcacttttaggttgctttttaaaagagaactctctgcccaacacccccacaaggtttgtaattaaaactgtaaatagtctttgtaaatttaattatatatattttctatttaaaagaaaaaaggagaaaaaaaaacaggggtgtgggcgccaggactgaagaatgaggtgtgtgtgtgttggggagtgtagttggggggagggttctctttcttaagtgcccttcaaaacccgccccacttttggagttttttggtgatatggcagggctgggcctgatgggagaggcacccagcctgagcgctgtttttgttggctttgagtcgttaggagtttgttccattcaactaatataaaagccaaatttgtgagcctcctctctgacgctgggcctgtggaagccgttggatatttttgaacaggacttggattcgttttgtttccttcccccttttctttccctactcatttgtcctgtcttcttcactcactcttggaaaagtcccaacagagatgaagacgtggaaaaaaaaatcggggtcggggtgtgctggtggggagagggcagagatccggtgaggaatggcttccaccccctggcccattcccctgcaggctggaagatctttctcctgtctggcttctcttcttttcaattcgctgcaccaagtgcttccagtggcccaaaaatgctttttgaagtgtgttttgaaacagcccccaccaacatacaccccaccaggagtactgatcctgcctcccttcatgtctaggggaagcattcgcctttgagcacttgtttgcaaatctggggagtttgagacctcctagcatctcttcccttctttccctgcagtctattcactcccgcagccaaaaatctctggcgttcaggttagcagtttctgggttggtttgtgtgggtttttgttgttgtttggggcttatttttttcaaaaagtgataaagacgggtgggttggagggaggggactgatgggctggtgggctttttagttttcctttgagaaaaagactggtttatttaaaatttgtccagaaaaaaatgaaaaaaaaaaaaaaggtggtatctttgctttagaagaagtctctggataggccctttgtggctgtgggggtgggttgagtgtttacattacattctatatcacaagattgataggatgtttaaagcagatgtttcttatcttcccctgagcccctacaaataaagtcaagacttttctttttttgagacggagtcttgctctgtcgcccaggctggagtgcagtggtgcgatcttggctcactgcaacctccactgcagcgtttctcctgcctcagcctcccaagtagctgggactacaggcgcacgccaccactccttgctaatttttgtatttttagtagacacagggtttcaccatattggccaggctggtctcgaactcctgacctcgttatctgcctgcctcggcctcctaaagtgctgggattacaggagtgagccacagtgcctggcctgtcaagacttctcttaagttaacttcctgagaagtgatgtctaaaagtatctttgctggtgtgagaactccagtttccaacacatattatttccctcaactatttggaatattttagaattttaattccaaaggattagtttgaatacaagtatgccacataactcagttttcgccatcttccatttcttaacagtgtaaattaaaagctaataatcataataataaagtgcatttaattatctttgagagatctatccttttaattgtatttaacagggttgtaacattttattagtttaaccaaaccacacctcctcctcccctctctcccttacctacttggctgggggtggggcagagaagagtgctcccagccctggaccttgctttcttagctaaatggtgatgggagaaatggtgccttaccaccctttgttggctgtcttccggacaagggagaaagttaagttagaacccctacttcgaagtgtttgcttgtgttagtttatgttgggggaggggaactggaaatgtttggtggtaattgaagtgatatgtggggctttgtttggaattgtatgaagcctgtggatttcagcagcgccccctcccaaaaatatataatttccccccaaatcatctgtgtcagtggccagttaaacctagctttttatcaaatgatgacaagtgtgagatctcaacatgaggttccctcaattatcaaagaagcaggcgggaggaggtgtcaccgcccccggctccatttgttgcaggattctaaagggaccccgcaaaggctgcaggaaagagtaaaattacaaacaaattgtgagtgcctctccttgtaataatgggaaaagccagagaatcaggtgggattttccagtacctggtattgagctcagtgggaagaggagctggtctctgttgaagattggggagagcctctcccacctataagccacccaagatcttggctctgtgtgctttgggtacatttgtccctggaccctcgcactgagcaaccccctcctcaaagtctcctgccaacataaaggaagagagcctgagacactgacaaaatagattatatgactgaggaggaagacagataataagacagttccatcttttggaaagaacagatcttagagatacccttccccttcttcagggggagtagccaagggctgaattaccctactgaaaattgttgtgggggaaccctcctctccacacccttgtcctgtttcttaaatgaaacactcttagaggaagggaagctttagaccacagtttggggaatttggggtaaagaggagaaagcaccctggaggaagactcagaggtaaaccacctgaactcactgcctcacgggagagggcacctcagctcccttgttcagaaaacccagttaaaaacaggagcttagagatctgcttttggagatttctaggtcgtcctttgagcagaaaagggtttccatgttgtaagtgggctggtccctccctctggaagagcgaggctttgtgtttgctggagggtcagggccaagaaggaaatacactcacctgtggcacctgggcctggggcaggtctcaggcccacgctgctttctgcctgctcttctgccctcccccagggcaatggtctggggtttcaaggtcccaggcatttctcctccagactcccccctcttattgatcaggctttccctcctcccagcccagacttccctccagaagactttaacgttagttccaaactttttgccctttaagattttttgaagagctagctctagaaaaaggccactaaagtttctcaagacaaaattcttctgaacatccccaaagaattaagattaggttcagcccagtgggatggggaactgctttttgttccaaaatctcttcaggagggtggggagatgctgtcccgggggtgcctgccatggggtctgagccgggcgagccctcccttctgcagtcttgctactcactgtaccagggtccctcctcctctagaatcactcttcttaccttaaatggatcttaaacttctgggggccactgaccatctgagaatctcaaaactctttggacctcttcctggaaaaaaaaaatagccagatcccccatgaatatgcaattgtgtgtagctttaggaagtttctagatcatccctccctgacctctctccctacccgcctgcccccaaactagttttcgagtcgctggtctagacattttttttttttttttttgagactgagtctcactctgtcgcccaggctggagtgtagtggcgcgatctcagctcactgcaatctccgcctcccgagttcaagcaattctcctgcctcaacctcctgagtagctgggattacaggtgtgcatcaccacacctggctaatttttgtatttttagtagagatggggtttcaccacgatggccaggctggtctcaaactcctgacctcaggtgatcctcccgcctcggcctcccaaagtactggaattacaggcatgagccgccgtgcctggcctgtctagacattttctagtcctgattactagctacctctccttctctaaaggacagcccttaccttctcagactccagtatcccccggtctctaatcacctctgctatggaaagggggtgggggtgaggagggaaagccactgggcctacaaaaccaggagtaccccggaaccagattattcactcagttcaatcctgccccttgatcaggtaacaagtgatcaagatgcagcagagtggaatatggatgaatgaaatttgtagttgggaaaaacggagagagagacagacaatgtatggcgagcagaggctttgacatgctttggtaccactcactgcagtagtagctgtgagcacttgtggcatttttctaacctctgagcgtgtgtcctcatctataaaaaggctgatagtacctgtctggtaacatgagtagtagacgggaccatacatctacagagccctcaggcagtagttcaataaattgtagcacttttccaattacttagaatacatttatttatttatttattttgagacggagtctggctctgtcgcccaggctggagtgcggtggcgcgatctcggctcactgcaagctccgcctcccgggttcacgccattctcctgcctcagcctctggagtagctgggactacaggcgcccgccaccacgcctggctagttttttttgttttgttttgtatttttagtagagatgtggtttccccgggttagccaggatggtctcgatctcctgacctcgtgatccgcccgccttggcctcccaaagtgctgggattacaggtgtgagccaccgcgcctggcccccacttagaatacatttccaaaaataaaatcagtggatcaaaagatctaatttcttgacaagagaagtgttaccaatagtttttaaactgttccctatcatttaaaaggaccacagtcttcccttcccagcacttccctatcatttcctccgtgtgaagaggtacatctaactgcccttagaatatggacgatgactggtcttagctgcttcatgctgatagggggcattgttttggggaaaacagcagtcagactcctcctagaggtctatctaagggttcctaggaaaggggagccatcatccgaggctccgattgcctgaccgtttgcagtttggtggcttctaggcgcaagagaataaaacaagttttataaggttaagtgtgcataaattaaacgtgtattatacaaggaaagaatttagtgccaaagattccagagacaagaagtaaaatatactaacaacattgtaccctgagctgtaagaaattaaaccttatataggagcagttcaacttgagaagagataactgttcttgccatatcttttagcagttaacaggtgcaccctgggaattctgggatttgtggacttgcacgatggccattaaagcttttgcctctttcctgtatctcctctctctttcctgggcctcccagtctctattataaaagaccaaggtggctactttcaggagtttcttcaaagtactatctggtcccggggcctgtttttgtatcttccttctgatgtcaggagctgcccaagtaataaattgatcctttagaattagttgtccctctactgaatcaggagatagagagaggtgctttaccaagctccctcttagcctctccaggaaggcagtgggattttcatcaaatccctggtcaatcatggacaatttagtataattgaggggcttggtcctagttcaatggtattgaaatgaatggtcccttcctgaggccacgccagtccttcctataaatcataatttggccaaacctttgtgcagagggctatgaggtgcttttccttcagatgctgagggtcaaagcaatcccaatggttcagaatacattatactccagaagagtataagctgggggtggtgaagagaactggttgcccattctgaaagacagggaaaaaaggcgtcccctactcccttccttctttcagcgaatactcagagtgtgatggagagagaaagcgagtatcctccctgcaccctccacctcttgtccctgagccctggtgaccttgtcaggtgccagccatgggtaccaatgcggtatgtacccatgaagcagggaaaacctggagaataggaattaactgctctcatctacacctccctttctccctccctttcttcctgctgtcagcaaactgagttccctgggcctgtttgtgccatggaacatggcctccttctatgtggtggggggttcactcgtcaggaattggttctgcccatttacattgtgcctgttgcctggctttggatccctcggacctggtttttctctctagggcctcagcctgaagcctggaatcgaatttgggattgaaaagttggtttagaggctgtttgtatctgttcagagtgtctcagatgtgccctgctgaatttgcagttctcagccagcaggggtcgctcctccgttaacttccctatcagaaactactgggatgggggagccctctcacttagaaaaggaaaaaaagaaaaacagttaaaaggccaaaaagaggaggattctgggagaagaaccccttgcttactgcaagtgggcccccctaatccttatatctttcctctagttcagaccgtgttgaattctttggccaggggaggaaaggttttattggcgcagccggcaagaagcgcccatccgtttgccctgtttggctaccaccacggctttctcccgcccactcttggctgttgggcttggcctttgcctgctgcgggcacgcatgggcgcctgagctgggaggggaaagggtgaagaaaggtgccctgagccatgcctgtggctgtcaaggtaaaggtgtacatggcacctctaggaaaagttggtctgattggcacatttcaaaccgtgtgagagcggctgggtgcgctggctcacgcctatgatcccagcactttgggaggccgaggcgggcggatcacaaggtcaggggttggagaccagcctgaccaacatggtgaaacccagtctctactaacaatacaaaaattagccgggcgtggtggcgcttgcctgtaatcccagctactcaggaggctgaggcaggagaatcgtttgaacctgggaagcggaggttgcagtgagccaagatcgcaccaccgcactccagcctgggtgatagaatgagactccgtctcaaaaaaaaaaaaaaaaaaacaaacaaagaaaagaaaaagaaaaatgaggcccagaggccagagagacactgcctgaagctcacaggtaattgcagaattggagctcaaacccagcttttagtccttatgcttttttttagactaatttttttagaggaaggtacaagagttcccatatacccctgtccctacacatacataacctaccttccccattatcaacatccctcaccagaggagtacttttttttttttttttttttttgagatggagtctcgctctgtcgcccaggctagagtgcagtggcacatcttagctcactgcaacctctgcctccctggttcaaacgattctcctgcctcagcctcccaagtagctgggattacaggcatccactaccacgcctagctaatttttgtatttttagtagagatagggttttaccatattggccagggtggtcacgaactcctgacctcagatgatccgtttgtctcagcctcccaaagtgctgagattacaggcatgagctactacatccggccaccaaaggagtacatttgttacaattgataaacctacactgacacatcattatcaatcaaagtccacagtttacattaaggttcactgttggtttactttcttgtttgtttgtttttgagacagggtctctgtcacccaggctacagtgcagtggtacgatctcgactcactgcagccttgacctcctgggctcaagggatcctcccacctcagccccccaagtggctaggactacaggtgtgtgccaccacagctgactaatttttgtgtgtgtgtgtgtggtttttttgttttgttttggtttggtttttttagtagagacagggttttgccatattgcccaggctggttttgaactcctgagctcgagtgatccgcctgccttggcctcccagagtgctaggattacaggtgtgagccaccgtgcctggacttgtgttgtactttctataatgtataatgacatatatacaacattaaagtatcacacagactattttcgctgacctaaatatcctctatgctctacctattcaaccctcccagccccaccaacccctagcaaccactgatctttttactgtctccacagttttgccttttctagaatatcatagagttggaatcatactatatgtagccttttcagattggcttctttgacttagtaatatgcatttcaggttcctccacgtgtttttgagaggtgacagcctgctggcagccctcgctcactctcggcgcctcctctgcctgggctcccactttggcggcacgtgaggagcccttcagcccaccactgcactgtgggagccccttcctgggctgcccaaggctggagctggctccctcagcttgcggggaggtgtggagggagaggcgcgggcaggaactggggctgcacggggcgcttgggggccagcgcgagttctgggtgggcgtgggctcggcgggccccgcactcgtagcggccagccagcccgcaagccccgggcagtgaggggcttagcacctgggccagtagctgctgtgctggatttctcgccaggccttagctgcctccctgctgggcagggctcgggacctgcagcccactatgcctgagcctccaccccttcctctcccccacgccgtgggctcctgcacggcccgagcctcccggagagcgctgccccctgctctagggcgcccagtcccatcgatcacccaagggctgaggagtgtgggttcacagcgcgggacccgcaggcagctccacctgtggccccgatgcgggatccactgggtgaagccagctgggctcctgagtctagtggggacttggggagcttttatgtctagctgggggattgtggatacaccaatcagcactctgtatctagctcaaggtttgtaaacacaccaatcagcacgctgtgtctagctcagggtttgtgaatgcagcaatggacactctgtgtctagctaatctagtggggacgtggagaacttttgtgtctagctcagggattgtaaacgcaccaatcagcaccctgtcaaaatggaccaatcagctctctgtaaaacagaccaatcggcgctctgtaaaatggaccaatcagcaggatgtgggtggggccagataggagaataaaagcagactgccccgactcagcagtgcaagcagactgccccgactcagcagtggcaatgtactcgggtcctatttctccggggggggggggggggggggggttggggggtggagagaggaagctttattctttcactttttggaataaattttgttgctgtttgttctttggatctacactacttttatgagttgtaacactcaccgggaaggtctgcagctttgctcctgaagccagcgagaccacgaacccaccgggaggaacgaacaactccagatgcgtcgacttaagagctgtaacactcactgcgaaagtctgcagctttactcctgagctagtgagaccacgaacccaccaggaggaagaaactctgaacacatccgaacgtcagaaagaataaactctggacacgccgcctttaagaactgtaacacttaccgcgagggtctgcggcttcattcttgaagtcagtgagaccaagaacccaccaattctggacacattttcgtggtttgatagcacgtttccttttagcactgaataatgtctggctattccacagtttttcaaagcagattaattatgccctggctaccaacttgcttgagttgggtggaacagaaaaacccccccaatcaaataagctacacgcaccagatgtattacttacagataggcagcaagggacagcgtagcctaggactcagccagtcccccgaggctcacaaaagctgcctggggtgaatggagtcttgtcagtgtgtatgtcttgcttacctcactagcaaactgccctgggttttgtatcctagggacaacaggacttggtgggctaaaatgttgaaggacgtcctatttctttcttgttttctttttttttaaaggatattctatttctaggagggcctggaatagagctcaggctgtgctgtccagtccctcgttatcccaggatgctgcattcccagaacaatctacggttattcttgaatactataagtgagaaagcggagaactgggtggcccaaggccacccggagaactgtctggtaagtttattcacctatcgaagggcatcttcgttgcttctaagctttggtaattataaagctgctgtaaacatccatgtacaggtttttatgtagacataattttttttttttttgagacaaagtctcgctctctttccccaggctggagtgcagtggcatgatctaggttcactgcaacttccgcctctcgggttcaagcgattgtcctgcctcagcctcctgggtagctgggattacaggtgcctgccaccacacccagctaatttttgtatttttagtagagacggcattttaccatgttggacaggctggtcttgaactcctgacctcaggtgatccgcccatctcgcctcccaaagtgctgggattacaggcgtgagccaccgtgcccggccacctagacgtaaatttttaacacgtgggtaaataccaaggtgcttgattgctggattgtatggtaaaagtatgtttagtggtgtaagaaactgccaaactatcttccaaagtggttgtaccgtgttacattcccaccagcagtgaatgagggtttctgttattccacatcctccacggcatttggtattgtcagtattccagatttgggccattccaatagatacgtagtagtatttcattgtttgaatttgcattttcccgatgacataggatatagaggtcttttcatatgcttaccttccatctgtatgtctttggtgagatgtgtgttagggtctttggtcctttttttttttttttttttgaggcacctgccgccaccacgcctggttattttttttttgtatttttagtagagatggggtttcgccgtgttagccaggatggtctcaatcttctgacctcaggatccgcccgccttggcctcccaaagtgcttacaggcgtgagccactgcgcccggcctggtccattttttaattgggttatttgatttcttattgttgagtttcaagagtttttggctcggcatggtggctcatgtctgtaatcccaacactttaggagtcaaggcaggaggatttcttgagcccaggaatttgaggccagtctgggcaacatagcaagaccctgtctctacaaaaaaaatttaaaaattagccgggcatggtggcgcatacctgtagtcccagctactctggggggctgaagcaggaggactacttgagcccagggagatgaaggttgcagtgagccatgatcatgtcactgcactacagcctgggtgacgatgcaagatcatgtctcaaataaataaatagtggctgggcgcagtggcttacgcctgcattctcagcactttgggaggctgaggcaggcagatcacttgagttcaggagtttgagaccagcctggccaacgtggcgaaacctcgtctctaccaaaagtataaaaaattagccgggtgtggtggcatgcacctgtaatcgcagctacttgggaggctgaggcatgagaattgcttgaatctgggaggaggaggttgttgtgagccgagatcgcgcctctgcacccagcctgggtaacagagcaagactccatctcaaaaaaataaaaaatcagaaaaattttaaaagacttatttctttgtatattttggagaacagtactttatcagatgtgtattttgcaaatattttttcccagtctgtggcttgttttctcattctcttgacaatgtctttctccatatgccttcacacactcattagcagagttttccaaactgcaatatgtaatccattagtgagttgcaaaatcaattagtgagatgtaactagcattaaaaaaaaattagaacagaatggaatagaaaagatcacagtgcagcaccaataggaaaggtaagtaatgtctggagaaactttgatttccacttatatgattatataagtgcatgtgacctggatcatacataaaatgtatggattatatttttttttttttttgagatggagtttcactctgttgcccaggctgcagtgcaatgggacaatcttggctcactgcaatctccatctcctgggttcaagtgatactcctgcctcagcctcccgagtagctgggattacaggcatgcgccaccatgcttggctaattttgtatttttagtagagaaggggtttcaccattggtcaggctggtcttgaactcctgacctcaggtgatccacccgcctcggcttcccaaagtgctaggattataggtgtgagtcaccacacctggccttcataattttttaaagtctaaaaactgctactctaaagggacatctactctgtcctcaggttctcatactctaagtcaataaaagaataaacgtatatgaactaattaaagaacactttgaaaacattatagaatatgtcaatttgtaccaattttgtttctgttctcagggaatgcagaggtaaatgcctgattggtaaattagggaagacttggctcccacaaaatccccactagcctcctttaaaacttttagttgtcctgcttgggttgaggcctttatcagatctcaagcttttgataataaggagtacatctctctttttttttaaaaaaaaaaaaagacagggcctctctctgtcacccaggctggagtgcagtggtgctgtaacctcgaactcctgggctcaagctatcctactgcctcagcctcctgagtagctagcactataggcgcatgccacgacatctggctaaatttttttttttttttttttttttttttgtagagacagggtcttgctatgtcacccaagctggtcttgaactcctggcctcaaacaatcctctcagccttccaaagcattggaattacagccatgagccatgactgccagcatttggccatttagaacattttgtcgtgagctcttggacctggccaactccaaatgttatcccttcctgctccttctccctgcctctcaccctagagagatactcaggctgattccattcctaaaggagtgcccaaatgactcttggattcagaccagcataggaataaatactaggaatatgttctttacatctctggctaggcaaaaaacattttttttttgtatttgtttttgtttttttaagacagagtttcactcttgttgcccgggctggagtgcaattcacagtctccaatcactgcaacctccgcctcccaggttcaagtgattctcctgcctcagcctcccaagtagctgggattacaggcatgtaccaccacacccagctaaaattttgtatttttagtagagatggggtttcactgtgttggtcaagttggtcttgaactcctgaactcaggtgatctgcccacctcggcctctcaaagtgctgggattacaggcgtgagccaccacacccgggtgtaatcgtatttttaaagccacattcaagttacaaggagtgcatgccctgaggcaggtctggctgtaattgggaaattgagaccccttgacttataaaattttgggctccattcttgctgcttatatctgtttctgggacttgttggcttgaggatccaacccttaatgttcagccctctgcctggtgcctggcctgttgctttccagtctcccagtctggattcctgcttcctgacccttgatttcctaggccatgcctcaatcgtctccctacactcagctaccctccagggatcctggattcctggatttgacctcttgcttgcttaccccatggttcatgcatgctactccttctgtcctttactttctgtgatttcttgtcctcccaacttacttagttgcattgcctgcccgcccttaactccggctcctcctaccactatgttcttgttattcctcagtttctggggtgactcttctgcttcacccttccttcatgttctgatgcttagctccagctccaaactgacaagttaagaggctgaggctggacacggtggcttacgcctgtaatcccaacactttgggaggctgaggtgggcagatcatgaggtcaggagttcgagaccagcctgaccaacgtggtgaaatcctgtctctactaaaaatacaaaaattagctgggtgtggtggcgggcgcctgtaatcccagctacttgggaggttgaggcaggagaatcgcttgaacccaggaggcagagattgcagtgagctgagatcatgtcattgcactccagcctgggcaacagagcgagactccatctcaaaaaaaaaaaaagaaaaagagggtgagataaccattcaccatgtaccctgccttcatttgtcactctttaagagtcacttggtgtccttactgggctgtggctgcaggacatggcctatctttcatagcctcaattccctccacaacagccaatcatcaatagaatttcagaccaattgtcttgaatgcaacaaagctgctaaatcctctcaactcccctggacccagcactttgcatgggaagagaatggaaccaggatgattatttcctgtagccatccacatggcatcgaaggaggaaaggtgtaacaagccattttgtccatttgaagcaattactcaaactgctcccaccaagaccagaatgtttcaatgatgtctgtgagcaggcaccagttaggaggttattataataatctggaacgtaaggacaagaacctgaactggagagacagcagtgaacagataagagaaagcaagagacagaaacaaggtattttcatgaaaaagagcaatatcacttggaaactaaatagagggaaaggagagaaggattaatcaatgccaaggccgttgttggatgtaatcaggttatctccagttggatcaccccatgggcagctacaaccaacgaatctaaaacttaacagatttaggccacctgttacattcagtggttctgtcactccctcagccatctgcatttgaaactttagatggtctttgattctactcatatgttctttctttcctttttttttctttctttctttttttttttttttttttttttttttttttttttgagatggagtcttgctctgtcacccaggcaggagtgcagtggtatgatcttggctcactgcaacctctgtctcccaggttcaagagattctcctgcctcggcttcccgagtagctgggactacaggtgtgtaccaccacacccagctaatttttgtatttttagcagagacagggtttcaccatgttggccaggctggtcttgaactcctgacttcaaatgatccgcctgccttgcaagtgttaggattacaggcgtgagccactgcgcccggcccatttgctctttcttagttccagtaaatcaccaaatcctactgatgtttcctttaaaaatgtctcttaaaatacaccccattcttttatttctagtgctcctacactggtttaggatctcagagattctagccagcactcgtcttagttctgccttcagccttctctgcttcaatccatgccacacacagctgccacataatcttgccaaaacaccactttaaacatgctacctcacttgccaaaaaaaaaaaaaaaatacacccatgacttctgtcatgtgggaaattatcttgctgcaatagtagcctccaagttcatgaccacagagctatctctgaggtcacacaacagaaaggctcctagacaaagctaaaatgctcgaatcacatggtttattaaatcaacttaaaacacagagcaagatgcaagggaaaagggatggggctatttaaccaagttagggtagggtgcaagctaggtggaaggaccatactacctgaatctagggtgcacaggttcatctgttttgtatctttttctattgcatctccttccctgatgaggatgttacaagggccagcgttgacatttaagcaggggtacccacagatagatgtcctggtccaatgacacacttgctttttcagacagaggaagtcaagtttgcaggggcgtagctgtagcttgctaattagtttgatgagcagccacgattatatttgtatatcttgagcagagggcacatgggccagaataaatgtcaccaatagattgaattaaaacctcgtgtgggaggagggagagcatcaggaagaatagctcagggatgctgtgcttaatacctaggtgaagggatgatctgcacagcaaaccaccatggcacacgtttacctatgtaacaaacctgcacatcctgcatacatacccctaaactcagaagttggaaattaaaaaaaaaaaaaaaacctcatgagaggggccaggcgctgtggctcacacctgtaattccagcactttgggaggccaaggcaggcagattgctttgagttcacgagaccagcatggacaacacagcaaaaccccatctctactaaaaatacaaaaaaaatttagccaagagtgatggtgcatgcctgtaatcctagttactcaggaggctgaggtgggaggatggcctggaaggcagaggttgcagtgagctgagatcacaccactgcacttcagcttgggaaacagagccagaccctgcctcaaaaaaaaaaaaaaaaaaccttatgagaggtgatggatatgctaattaccctgatttgatggttacacaatgtgtatatgtatcaaaacatcacactgtaccccataaatatgtacaattattatgtgtcaattaaaatcaaacttattttttaaaaaacctcacgggccaggtgcggtggctcatacctgtaatcccagcactttgggaggcggagcaggcagattgcttgagcccaagagtttgagaccagcttgggcaacatggcgaaaccccacctctactaaaaatacaaaaattagctgggcctggtggcgcgtgcctgtagtcacagctacttgggaggctgaagtgggaggatcacttaagcctgggaggcagaggttgcagtgagtcatgattgcgccactacactctagcctgagcgacagaaaaagactgtctcaaaacaaaaataaaaacaaaaacaggccaggcatggtggctcatgcctgtaatcccagcactttgggaagctgaggcaggcggatcacgaggtcaggagatcgagaccattctggctaatacggcaaaaccccgtctctactaaaaatacaaaaaaattagctgggtgtggtggcagtcacctgtaatcccagctactccagaggctgaggcaggggaatcgcttgaacctggtaggcggaggttgcagtgagccaaaatcgtgccattgtgccaccgtaccccagcctgggtgacagtgaaactccatctaaaaaaaaaaaaacacacacacacacatccgggcacggtggctcacacctgtaatcccagcactttgggaggccgaggtgggtggatcacctgaggtcgggagttcaagaccagcctgaccaaaatggagaaaccccgtctctactaaaaatacaaaattagccagggtggtggcacatgcctgtactcaggaggctgaggcaggagaatcgcttgaacccaggaggcggaggttgcggtgagccgagatcgtgccattgcactccagcctggacaaaaagagcgaaactccatctcaaaaaaaacaaaacaaaatctcatgaatattgagtgctcatacatatttggtgtctcctgaatattagtgcctttggtgtatttagtgctttgtatgtcttacgcatgtttaggatattaggaatctttagtaccttttgtgcatttagtatagcatggctgtttagtacccaggtgcctcatgaatgttaggcatctcttggtcctttctatgtttaacacacagatgctctacttgctaactatttaacacaccgttctgcctatgtctaaaaaacattttgttgaaacatcttaaaatgtttcacccatgttttccaaactacacacttatcttttctagcagggttgagtattctcagggtaaatttacattacagtcttctctttgccacatgaactaagcccctgatctactccctcctgcctcaaattgcttcctccttcaatcttttcaatctcagaagtggcatttcctgatctcagagtcagcgttgtcttcaaacactcttaactctcctcatacccaattcagccacatctcacacttctattcctaaaatagactttcatgtacttctgtctgtctccactgccaccccagtccaagccaccaccaatcttctgagataactggaatttggttctctctctgctcttggccacttcaatcctgttccacacaacagcccagaatgctctttccccaacatcagttggatcccctgctttaactgttcggtagtttcccattgtatttaggatcaaatccaaagttcttaattttggtgtatgagagtctgaatggcagactgtgttacctctctagccccatctcagcaccagatggagtttcaccatgttggccaggatagtcttgatctcctaacctcaggtgatccacccacttcggcctcccaaagtgctgggattacagatgtgagccaccgcacccagcctcagcacctgtcttgctttagtaatacttcacaggatctttagtttcttccttatggctttcgcaaatccagttttgttttgtacccccccccctttttttttttgagatggagtctcgctctgtcgcccaggctggagagcagtggtgccatctcagctcactgcaagcactgcctgctgggttcaagtgattcttgtgcctcagcctcccgagtagctgagattacagtcatgcgctaccacgcccggctaatttttgtatttttagtagaaacggggtttcaccatgttggccaggctggtcttgaactcttggcctcaggtgatctggccacctcagcttcccaaagtgctgggattacaggtgtgagccaccgtgcccagccttgttttgctttatttttaagagacagagtctttcccggtcacccaggctggagtgtagtagtgagctcatagttcagtgtaaccttgaacgcctcagccacctgagtagctaggactacaggtgctcgccaccacactagctatttatttatttttagagatggggtcttgctgtgttgcccagtctggcctcaaattcctggcctcaaggaattgtcttgcctcagtctcccaaacttttagtgagttatttagcctctctgattctcaacatttctcacttatgaaatggggatagagataagtgtctcacaagttgctgtgaggatccagtaggaataggtcctggaaagcccctggcaggtaactgaccaaagcgttcagtaaacccttgttcctgctcactgctttcagggccagcacatttcctctactcctctgcctgccctgcacctcattcttctcaacctcagtaggtccctcaaggtcatgtcttcagggagccccggagcccccttcagcccagcccctgatgaatgcccacgcctcaaactctttagcttctcatttccagtttgtggaatgtactatggtaactgttttctgtttgtttaaatctttcatgcgtctgtcctgtttctttaactagatcccaaacacctttggcaagaggcttcccatctcacagcttctcgtattcctcctagtacctggctcagtgccctacgtagagatattcaacttagatgcatctaatgtgtgtgagtgccaacgggatgccaggcactgtgcttggcctccatgttaattatcacctaacttcattttttatgataatcctgccaggtaagtattgctatgcctgttgtgaaaacggagcttcagcgatttagtcatttgcttaagggcacccagttaacaaacagtagccttttaactctctggtttatagcctggtacatagtagatactcaataaatacttgttagtgctctttccattataccatgttgcctttttgggggaatagttattcatagggcagatgaataattttcatcgtgttctcaattcttacccacctctgcaccccccacaagagcttagctgaaaatctcctatccttgattctgtaccctaaagttcttccagggtcctgcaaccctaattctcatttcctgttattctaattcagtttcctattagtgccacatctgtttgctaagttctcatagagcctgaagcaggatacccatctgtctccccacaaaccccgtcctctctttcttccaaagcttctcttcctcatggtcccccttcctctgttctccatctatccctgctttaattcaagttgttaattcaggttgtgccctgttggaggaatctccatagcattatctgcttctgctgcttatgatgatgatgatgatgatgatgatgatgatgagagggagtcttgctctgtcgcccaggctggaatgcagtggtgcgatcacagctcactgcatcctcaaactcctgggctcaagcgatcctcctgcctcagcctcccaagtagctgggactacagacagtcatgtgccaccaagccagggtaattttttactttttgtagagatggggtctctccatgttgcctaggatggactcgaactcctgagctcaattaagaaataacacccctacctgggaatgccctctaaactacagcacttaagtctaggaggtgcctagagttctttggggtgggcgtttgggcaagttatgtcccctctcctggcctgaatttcctcacatgtaaaatggtactgcttgttaacacctatcaagtccctatgtaaggtacgtaaggtacattagcattgcatgtatgatgaaaagtcagtcatagcagatgcttacacagcatctactgtgtgccacacacgatgccaagtgctttatatatatttattcacttaatcctcacaacaaccctatgaaaatgttattattaaccctatttcacaggtgaaaaacagaggtctccaaattaagtaattcaccctggatcacccctgacggcagtgaagctgggtttcaaattctggcagttctgggctccagagtccctgtcttaaccactgccctatacttcctcttattacctcataaaatgaggggggctagttaaaaataatcccctagcatttttatagcacttttctaattctaaagcactgttcacattctgtgccctatttgatcttcacaacaaccctaagggaaggcattattagcccaatttatggggcaagaactgagacttattagaagggtcatgtgtccaagggctcacagctgacaaagacagattcagtactcaaatccaggaccatccgttcccactgccccttctgctatgcctgggatctcagacgccaaacaatactttctgtcctttcatttttcttttccttttttgagacagtgtctcactcagtcgctcaggctggagtgcagtgtcgatcatagctaactgcagcctcgaactcctgggctcaagcagtccttctgcctctatcctccaaagcgctgggactacaggtgcacaccagggcacccagctcatcctgtcctttccaaggctcttgcagctccagcatcatacactgtttttttctctctgcgtttctttaaagaggatgcagtgttccctgaaagaatccaccaccctggccaggcgcggtggctcacgcctgtaatcccagcactttgggaggccgaggtgggcggatcacctgaggtcagaagttcaagaccagcctgagcaacatggagaaaccccgtctctactgaaaatacaaaattagccgggcatggtggctcatatctgtaattccagctactcgggagactgaggcaggagaatcacttgaacccaggtggccaagtttgcagtgagccgagatcaagccattgcactccagcttgggcaacaagagtgaaattctgtcttaaaaaaaaatcccccaccctgtcacctccccccgagccctgcacagcgcatgctcacaaacagcagcagggggtgctgtagatgaacacacaggcactgccaggcgggcaccctgttggaggaatctccatggcacttgctgctgctgattattattattattattagacagggtctcgctacgtcgcccaggctggaatgcagtggtgcgatcacagctcgctgcatcctcaaactcctcggctcaggtgatcctcccacctcagcctcccaagtagctgagactacagacaggtatgtgccaccatgctgggctaattttttactttttgtagaggtggggtctcgccaggttgcccaggatgggctcaaactcctgagctcaagcaatctgcctgcctcagcctcccaaagtgctgagattacaggtgtgagccactgcagatgtttttttagcaagtaccgcttgtacgtagtataaaatttaaaaggtacaaatgaatatgcaatgtacctgcctcccagctgtgcagttccccttcctggagcaagctgaggaagttttgtagtgtttcattctagagacagtttatgcttatataagcaagtatatattgttttccacgtcaatgttagcatacaaacatgcacatattattttttatgcctcacacaaatgatatcgtactatacacactattcttcccctagctttttcaaagtaatttatcttgcagattaatccatatcataattcataatatttaattgaataggttaactataatcaattttaccagccctctattttctaatcctgtacagttacaagcaaagctgcaataaatacatttctccctaaatcgctttgcacgtgtgcatttctgcaggatagatccccagaagtgaacctgcttacctgaaatggcatgcatttgtaatgttgatcaatactgctaaatcaccttgcacagaagctacccatttacagctgcaatcggggggcacacaagtctgtttcctacaccctcaccaactcagaattttatcaagctttctgatctttgcctatcctataggtaaaagatggtttctcactgcagttgttttttgtttgtttgtttgtttgttttctgagacagagtcttgctctgtcgcccaggctggagtgcagtggcgcgatgttggctcactgcaagctccgcctcccgggttcatgccattctcctgccttagcctcctggtagctgggactacaggcacccaccaccacgcctggctaatttttttggtatttttagtagagacggggtttcacagtgttagccaggatggtctcgatctcctgacctcatgatccgcccgcctcagcctcccaaagtgctgggattacaggcgtgagccactgcacccagccctcactgcagatttgattgcatttctcttataataagtgcttcctgatttctgagattcattaatacaatgcataaataattagcaggtacctccaggcactgtgttggggtaaactcctccatctgtccctggtccaactcactgtgtcatttcctgcctgccctgtactgtcttgccttgttgcatccgttaggaagccattttcatggcttggccatcctcagcaagtcaaggaggggtgacctcacttgacctcttgtagagggttaggagtgaggagaatgtgtttttttttgttttttgtttttgtctgtttgttcttgtttttaccttttctttgtttctcaataataatttctgcaacccaattaagcaaagctgagggatggggcacaggttttttttgtttgtttgtttgtttgtttttctagagacagggtctcactctctcacctaggttggaatgcagtgccacaatcatagctcatgcaacctcgacctcctgggctcaagccatcctcctaccttggcctcccaaggtgttgggattatgggtgtgagccactgcacctggcccaggcacatttgtcttgtggtcagagttacccctgagtccaagggcttcccagagtcactcagtccagtgggccactcagtgcttcggtcttctcatcctaacccctctgtggtgtcaggatggtggacaaagagcaggtagctggacacttggctgtgttcagcggatgttgtttgcttcatgactggcaggttgaaacttcctcagattaggtgccagctaaacataaaatgtgtttgctagcagcgcttttagattaaagtaagaccaagaaaaagctagggttcctgttcccttctgtgtgggaaacctttgcaggtttctttgcagtgcagagcacttcaccttgacaggagggagtcctggcccaccaggcagagtaactgcttgctcacctgcctgcttcataaacctgtgatcaacctgaggctcacaccttattgaggcctcctcagaataagggcagaatcaacacctgggaactttgaatgactctcttcccggttccagttcccaagaacggcaacctgaaggagcccacatctttctttggcagcttaactaatgtaatgagacctgcagttcatccacagcctgaaattttcctcctaaagcgcgcttttaatccagtcacttgtagaggttccccgtggcctactaaatgaagtgcaaattccttagcttggaatttaagggcctccgtgatatggctctggtctacattcccagtccctttttccactacctcacgctccagactgactcagtgtttccccgtgtgcccacgttcccaccctgcgccttcgccccagtcgtcctttctctgcccagaacatgtacccctgctcctctgccatggcggatgccctcctctctctctcttttcccagccatgctttgtttagaaagtaagaataatgaggtttttctttttaagaaaaatataggccgggcatggtggctcacgcctataatcccagcactgtgggaggctgaggcagatggatcactttgaggtcaggagttcaagaccagcctggccaacatggtgaaaccctgtctctactaaaaatacaaaaattagccgggcatggtggtggaagcctataatcccagctactcaggaggctgaggcaggagaatcgcttgaacccaggaggcggaggttatagtcagccgagatttccccactgcacttcagcctgggagacagagcaagactctgtctaaaaaataaaaattatatatatatatatatatatatatatatatatatatatataaatttcccatatccttcagggtctttctcaaaggtaactggcccacagctgcctgctcatcccacgtctcaggggatgatctttcctggcctggctcccactcaggcttcgtttctccacctctcatgtctcaagtcccctctatcttgcatcctcgttcctgccccaccccagtgagcgctggagagccaaacaggtgtctgtcatctatgcactgtctaccgctgatcagtatcagccaatcgtctgatctgagtcactctgaaattggagactcctcccctgctgccacctcctctttctgctttgagtatgagaaatgggaagagtttggaacctgtcactgcaaccgctgctgccaccccttcaagtccttccctatgagggctctccttttaactcacagcctcccctctaaagtcaggagatgaggtcagccctgaaccccaccctatgtcccatcccccagccgacacaaacaccacagagatcaatggggacctgtgttctaggcttgggatgaaactgtcccgtttgctcttttcctgaggtaggtaccatggttacgtgtctggccggaacatttgttcactttgagttcttggaatgaatgcgccagaaaagggagaaatcaaaagccatctcttctgtggccctggtctcttgcgtgtgcagataggcatggtcacctctctgctaatgacctgtgtggtattaggtggtgatgtatgcactggcgaggctggaggaagacaacctggcccttctccagggcttgcttctggcaccttctgcagagcaaagagtgggaccttggagttagaatacctgagtcctagttcttactccaccattcgttccatagcagatgcccttgaccaaggtccttaatccccctcagcctaaaaatagaaaatagttatattttctttaccttctacatgggcttttctgagcatcaaaagagaaaatgtatgtgagagtgttgtgcaaattattattattatttttagacagagccttgctctgtctcccaggctggagtgcagcagcactatcttggttactgcaacctccgcctcctgggttcaagcgattctcctgcctcagcctccgaagtagctggggctactggcacgcaccaccccgcctggctaacttttttgtatttttactagagagggggttttaccatgttggccaggctggtctcaaactcctgacctcaggtgatcctcctgcctcggcctcccaaagtgctgggattacaggcatgagccaccctgcctggccacaaattatatatatatatttgagacgaagtctcgctctgtcgccaggctggagtgcagtgctgcgatctcggctcactgcaacctccgcctcccgggttcacgccattctcctgcctcgacttcccaagtagctgggactacagacgcacaccaccatgcccagctaatttttgtatttttagtagagaccgcgtttcatcacgttggccaggacgatcttgatctcttgacctcgtgatctgctcacctcggcctcccaaagtgctgagattacaggtgtgagccactgtgcccggcctttagcctcttgtgttgaatgccataccaatccagccttctttgccacacagacctccttggttccttttcctttggtgtcttcctgccctgattcttttttttttttttttttttttttgagacagagtctcactctgtcgccaggctggagtgtagttgtccaatctcggcttactgcaacctccacctccctggttcaagcgattctcctgcctcagcctcctgagtagctggaactacaggcgcctgccaccacacccagctaatttttgtatttttagtagaggtggggtttcaccatgttagccaggatggtctcgatctcttgacctcgtgttccgcccacctcagcctcccaaagtgctgggattacaggcgtgagccactgcacccagccctgattcttaactccctaagagttctgggcttaaaagttgccccatatttccagcattttgcacctctgacccatcgctttagctgggttccccatgagattgcctatgctgaaaaaaataactggatctggggccggtggggagtgcacagaaaggcaccagtgtgacctccacatttgtgagattgaggacacccaatgagaatccaggctgagagaggccatgggcatgaccagccagggagctgcagcacttgacagataacattgttagactgtgactcactctctgcagtctggaaagctcaacctctctgcttggccttcccaggagggccactcagatcatgcaaccctctgagctccaggttgggcaggcagagcgggggcctcttaattccagagctggactgtttcctccccttcaccccacatggaaaatcccacatgttaaaaggttatgtgttgggagcctgcagggagaaaaaaacttgccccgtttgtgctttccaagagagaagcaggagccatcggagctcctgaccctgtccaggaccctgtcctctgctgacccacggtggggacccaaacccaagctctggggttattttcttcctttgctgaaggctgttcctcgaccttgaggcactcacatcactctctcctcattcccctctcctccttccctctcaggtttctctccatcattctactgtttttattttattttattatatattatttatttattgagacagagtctcactctgtctggagtacaatggtgcaatcttggctcacttcaacctttgcctctcgggttcaagcagttctcctgcctcagcctcccaagtagctgggattacaggtatctgccatcaagcctggctgattttttgtatttttagtagagaccgggttttgccaatgttggccaggctagtcacaaactcctgacctcaggctagtcacgaacacctgcctcggcctctcaaagtgctgagattacaggcgtgagccgccgcgcccagactttatttttattcatattttgagacacggtcttgccctattgcccaggctggagtggagtggtgtgaagacagctcactgtagccttgacctcctaggctcaagcgatcttcccacctcagcctctcaagtagctagaaccacaggtacacgccacgatgcctagctaattattttttcaattttgtagagatggggtctcgccatgttgcccaggctggtcttgaactcctgggttcaagcaatcctcccacctcggcctcccaaaatactgggattacaggcatcagccacggcacccagcattctcctgtttcccatcaaccatatcagcccatcaaatctttcacaatacaagaagggtgggtggggagggggaagagttttccttttccgtcttactcctttttcttctttggattccctatattttgggtgtcggtagaagtctgaaatgcaaataagaatgtcccactctgaaggcacagggaggggctgctgaattattaccctctaaattctagcacgttagacagttctggtctccttgcattcttggaggatgcaaggacctgactgtaatgtgcgggggagacagtttggtctctgggaacccccagtctggtggaggaacttagactaaagcaatggaagactgacagagcaatatggtcacaattgcaaatccttcaaaatgccggtgctacagagaataatcagcattgtggcatgactgtccagaagcaagttttgaaccattctgaataacggaagtcccaggatcctttatttaaaaaaaaaaaagtgtagagacagggtcttgttatgttgtccaggctggccttgaactgctggtctcaagcaattcttctgccttagcctctcaaggtgctgggattacaggcatgagcccctgcacctggccactcacccaggtttcttgaagcagtattttctcttctttgggattagccaagggcatctggagaagcaatgagaactacctcctttgaggggagagcggccacttgcacacaggctgggacaccatctcatagctaataatgacgttggtgtggtcatttttcccagctacacaagcacaagtcacttaccactcacaaccaccctgtagggcgggtggctatgatcacccccattttctaagtgaggttctaagaaatgaaatcactggcagctggctcactgatttggggccaagcccaggtcttctgaacgtaagtctagtggttattctgctatgctgcttggtcacttatgaggctggtgtctagagtcattactgagtctccaagtccccactgtctgccccatccttgacccacacaagtgccctgttcagtgttctgagggaaggcggaaagactcatgctcaggactcaggcttcccaggctcctcatgctgttcctaggcttggtttgacacctctcttcccctatcctgcctacccctcccacccacaccctcctagccccagctgacttagaggcagggagagggaggcaaggccagaaggcttttgtttttctacgatggagagatgactgaaatcccgccatctcccgcagaagacagaggcagctctggatttcctgttgctctcaacacgggccagataattggagacagattttggacttgggttgggaggtgaagtttgaaatacagtcgtcaggcctcctgtaagttcgtgtgtgtgagtgcacactgcttggttggggttttttattagctatatgtgtatctgtgtgtgtgtgcagatacttgtattggaaatagtgtattgtgtctagtgtgtgcatgtgtgtttgtgtgtattgtatctagtgtgttcatgtgtgtattgtgtctagtgtgtgcatgtgcgtttgtatgtattgtgtctagtgtgttcatgtgtgtttgtgtattgtgtctagtgtgtgcatgtgtgtgtattgtgtctagtgtgtgcatgtgtgtttgtatgtattgtgtctagtgtgttcatgtgtgtttgtgtattgtgtctagtgtgtgcatgtgtttgtatatgttgtgtctagtgtgttcatgtgtgtttgtgtattgtctagtgtgtgcatgtgtgtgtgtactgtgtctagtgtgttcatgtgtgtttgtgtattgtctagtgtgtgcatgtgtgtttgtgtataccgtgtctagtgtgtgcatgtgtgtatgtattatgtctagtgtgtgcatgtgtgtttgtattatgtctagtgtgtgcatgtgtgtttgtatgtattatgtctagtgtgtgcatgtgtgtttgtatggtgtctagtgtgtgcatgtgtgtttgtattgtgtctagtgtgttcatgtgtgtttgtattgtgtctagtgtgcatgtgtgtttgtgtgtattgtgtctagtgtgttcatgtgtgtttgtgtattgtgtctagtgtgtgcatgtgtttgtgtgtattgtgtctagtgtgttcacgtgtttgtattgtctagtgtgtgtgtattgtgtctagtgtgttcatgtgtgtttgtgtattgtctagtgtgtgcatgtgtgtgtattgtgtctagtgtgcatgtgtgtgtattgtgtctagtgtgttcatgtgtgtttgtatgtattgtgtctagtgtgtgcatgtgtttgtgtattgtgtctagtgtgtgcatgtgtgtttgtgtgtattgtgtctagtgtgtgcatgtgtttgtgtgtattgtgtctagtgtgttcacatgtgtttgtattgtgtctagtgtgtgtattgtgtctagtgttcatgtgtgtttgtattgtgtctagtgtgttcatgtgtgtttgtgtattgtgtctagtgtgtgcatgtgtgtttgtgtgtatcgtgtctactgtgtgcatgtgtttgtgtgtattgtgtctagtgtgttcatgtgtgtttgtgtattgtgtctagtgtgtgcatgtgtgtttggtacctgtgctccttgtacatctttagtgtttaagactccgcgtgtatgtgtatgtgtgagaaagtatgtaagtgtgtgtctggggctctgtgagtggctcccttgttttgtttaattttttttcctttgtgagattcagtctggcttggagagtccccaccagtcctttcaggatcttattactcacgacttggtgattaaatgtaatacaataattaagatttttttttaaaaaggaaggaaggcagatggccttcggggagataacatgaggggtagaaagcagccagagtgccttgagagcagacagccaagggtgaaggggacctgcagggcagaggggctcttttaggaggtacagacaaggccccagtttccccccatctctctgatggaaaaaggcaacacgcgcttccacaacggtttagctgcctctacccctgaaggttgggcaggggaggggctcctattgccttcctgcctgaatctctaccctggaagaagaatcaagcccctttcttctaaaggcctacgtgcacattcactaatgcgaattttgctataaatgacatgcagaccagttaggaagtagtcttctcataacaacaaccacagctagccatggtgtacctgcagcacatcagactccagctgggtactttacatgtgtttttgtatctgtgtgtgtgtgtgtaaaatcacttataagcttgttattacctttttgcagaggaaactgaggcttatgatagatgagtaaggactttaacccttcatggtgatagttcatttgttcatccaacaaatgtgtattgaatacttttttttttttttttttgagacagggtctggctctgttacccaggctggagtacaatgatatgatcttgactcactgcagcctccacctcccaggctcaaacaattctcctacctcagcctcctgaatagctgacactacatgcgtgcgccgctacgcccggctaatttttttttttttttttttttgtagagacgaggttttgccatgttgcccaggctggtctcgaactcctgagctcaagcaatggactgccttggcctcccaaagtgctgggattacaggtgtgagccactgtgcctggcccccatgtattgaatacctatctgctcaggcactacgctagatatgagggacacagaggtgaacgagacatagtccctgccctcacagaatccactctctagggagggaatcgatgcttcaaacattgaagttctccagcctggacaacatagcgagaccaaatctctaaaaaaaaattaaaaattagcaggacatgatggtgtacacctgcagtcccagctactcgggaggctgaggtgggaggatcatttgagcctgggaggttgaggctgcagtgagccatgatcgcactactccagcctgggcgatagggtgagagagcaaaagagagagagaggaaaaaagacagaggacacagggaggtagggagggaagaaggaaggaaggagggacggaaggaaagaaggaaggaaaggaaggaaggaaaaaaggaaggaaggaaagaggttgaagttcttctcactctttagttggggcagaccattcccagtgccagtgcagcggtggctgttatggggctgaggactttttggactggggcaagatttactccccagattagctgttcctcataaagaaatttccagtgaggactggatagggaggagaaggcatggcagacatggagggggatagatttgtgttctgggggcttgagagtggaggggaggagaggacacagcagtggcctgcttgcccactcatctgcttcgtagcctggcattggctgggagacacggtgtcctcagatggtccagtccccctggcaggaggaagaatcacgacggagttacccatgcccttgcctctccagatgggtctctgagagcccagagtggtgggttggggagggtagggtgggggtagcgaccctccctgcttctggcgatctgactcagttccccagggcagctgctacagcaccgctgcagccttcctggcctaaatcgcttccagcttgtttagtcgaaatccttggccccaacatcaaagcccctttggagtttctggggattgctgttcttatatggtgtttatttcagagatggttctgttgtcactggctgcatggggtggggcaggaggggctttggaggcccttgggtttcagagacaccaggttaggcgggtagagggacaatttccatgacaactgcccccaggatactatctcccccatgcctgcctctacctggggcataggtgcacagaaagggaggctgccttcttccctgcccaaggccccagagaggagcttctattcccttcaattgtatgccagacattttagtctgggctcccaggggtcaaggccatgccaccccctgccctcccatcccagccctcatcttagaacctatgagctcactccaagcaaacagctctccatctccagcatcagcttagccctctatgcctgggccaggtcccagctccttcacctgcatgcccctccttcagaagggccttttcttcctcttctttcactctgattagctggatgcctacttgggctattggaatttccatttggctctggaatctgcacctttttgcctctgagtttgcaggttccagcaggtcccttccttcctgcaacttgttcctcagtgcctagcacaggggaacacacagagaagaggggatgctctgttcaagttgaggcagatggggctgacagtgaggaggtgcggctcatggtttgggtggaggtagagctcctaggagtctccccaggaaaaaccggtagatgaagaagccaactctaggtctcagccattgtctagaacaagaacgaatgaaggaaagagacacagggaaagaaggagggagagagagcgaggaagggatgaggatgtgtatgtgtaacagggccaggttacaacctggcttacaaaaagcttacaaccatgatctacagggacagactccttctggactgacgttcactttcccgaacgttcctaggagtcagagggggtctccggactcccctcaacctttctaccctccccctaccacctcatctgcctctgatttttactcctatcatcttcctgggctatgcccttcttgcccccttgctttgtcaatgtccccagacaaagggaactcctggtgtaccagtggccaccttttttttttttttttgagacaaagtctctctctgttgcccaggctggagtacaatggcgcgatctcagctcactgcaacctccaccttctgggttcaagtgattctcctgcctcagcttcccgagtaactgggattacaggcaactgccaccacgtctggctaatttttgtatttttagtagagacagggtttcaccatgctggccaggctggtctcaaactcccaacctcaggcaatctgcccacctcagcctcccaaagtgctgggattacaggcgtgaggcaccgcgccgggcccagtggccaccttttaacctcccccattggataatactttagagttgcttgttaaaaatgagagcccagctgggagagatggagttaagacaaggagtagactcagctatcgtccctgccatgggacaatgagaaaggctccgagcctgagcctcccacacttttgcacacactgagacccaagaggtcagcatttacagggagctcccatctaggaacctggccagacaaggttgagcgtcctgttgtgtggactctcccatgggggagcctaactgggggccccctgcaagacgtgggagttcagaatccctgaacataggctccccgtcttcaaaccagtatctttaatgccctaaggagctgacctcctgattaggcggaatgcagttttgagccaccctctcccagggtggccccttggctcggttgtacagcaggtgcctccctctgcagcccaattcctcactctatgcccaccccaccttagcagactgcttattagttagtaatgttactatggctgcagctggtgattaaaaccattggttggactgagggttagcgatcaacatccctggcacggttgctaatcccttggaagtatgtttgtaataatcataggggaggaggtcagggtgggtggtcctgggagctgggatccagtcgtctcctgttggatcccgcagttcctgtggtttctcctgggcaagactctgaggtgtgttggggctgggcaaccacttggggagaccggccaatacctcagcagagggaggtggtgcctggtgcacagctgcctctgccagcaggacagggacagggttgtgccaagtgtgcagctcgggtggttaaatgaagtgcccagggtcaggatgctttagctacatggagggattaattctgagccccgtactgctcactcctgtgccaaatgcccagggaggaactgtgtattccaagggtccgttcgaggcttcctcattctctcttttttttctgagacagagtttcactcttgttgcccaggctggagtgcaatagtgggatctcggctcactgcaccctccgcctcctgggttcaagcgattctcctgcctcagcctcccgagtagctgggattacaggcatgtgccaccacggccggctaattttgtatttttagtagagatggggtttttccatgttggtcaggctggtctcgaactcctgagctcaggtgatccgcccacctcagcctcccaaagtgttgggattacaggcgtgagccaccgcgcctggcccctcattctctcttagaagagccttaagttggaagggacccatttccactcccttaagttcctcacctccccttccactcctgcctgtcccattcaatcatttaatttatataatgcctctagtaatatataattaaaactgacatattaataataaaattccactaaggaatgtgtgacaactcacctgccaaatcgaattttaaaaaataaataaataatatgatagactctttcccacctggaaccatggagaatgtcaaagagaagaaaaggaaggttctggctgtgccagaaatcgttgagaaaaggaatttctcagaggtgaagatcaagtgcctgagaaaaatatttgcccagaagacacttcaaaaggcaaggagagggccttgcacagtggctcatgcctgtaatcccagtactttgggaggccaaggcaggcagatcacgaggttgagagttcaagaccagcctggccaacatggtgaaaccctgtctctagtaaaaatacaaaaattagctgggtgtggtggcacgtgcctgtaatcacagctactcaggaggctgaggcaggagaatggtttgatcccaggaggtggacgttacagtaagctaagatcacacccctgcattccagcctgggcaacagagcaagcctccgttgcaaaaaaaaaaaaaaaaaaaaaaatccaaaaggcaaggaagggccaggtacagtggctgaggcctgtaatcccagcactttgggaggccaaggtgggcggatcacctaaggtcaggagttcaagaccagcctcgccaacattgtgaaacccccatctctactaaaaattaaaaaattagacgggtgtggtggtgcgtgcctgtaatcccagctactcaggaggctgaggcaggagaatcacttgaacttgagaatcacttgagatcgcgccactgcactccagcctgagtaacagagtgagactccatctcaaaaaaaaaaaaaaaaaaatgaagcagcagcagcaaatttccgtgacagataacactttactgcttgatctctttgttaatgtggcgtcacctgcatgaaggatctgattcatgagatctgtattgttaaaaaacaaaaacacttcaaagaagcaaataacttcccagggctattcaaattatcttcccaacgaggtggaatgaagaagacgaccactcattttgtagaaagtagagatactagtaacagggaagaccagattaacaggctcattagaaggatgaactgggaaggggtccaccaccatcatttttgtaattcagtcagttaataaacaattactgctttcaaattgaaatatatatatatgtatatacatatatggcacataatacatgtaagctatatattaatacattatgagttataatacaattatggttaacattttattgacttcctactttgtcagaccttttctatacgttacctcttttgttcacaacaccctgccaagcagggcttattgtcccattttatttagttttatttcatttcatttcattttttgagacagggtctcactctgtcacctaggctggagtgtattatcccattttatatatgagaagtcagactcagagaggttaacttgctcaatcacacagctaataggaggcaaggccagcagcaaccttaggtctcaggctaacttcaaacccattcttttccaggcttgacactgtagggaacatgaagaataaaagaatacatagtcagtgctgtcaaaacacggatcacccagcagcccggacatggcgcacacacgctaatagttaaataacagcatgacattgcttttggggggctgttaccaagcagtgtgggtgatggctccgggagtgggactggcagtaaatgtcacaggcttggaggaagaaggccaccaaggccagcagggaccactgatgactgcacagaagaaggggacataaaggctgggctggattggcagtgtgggaagagcaggagcagaggttcacggtgcacacggcagtgagcccatcagattggctcactccatcctgacaacttctgtcccccgactccccaaccctgtaaatgggcccacctttcacatttgaggacttggggcaaaagtacacataagaggcctcaaacaaaatttctaaatatttaaaacatataaatcaagcaaacaaacttaaataaaaatgtatcctatcctcttaccttgacaaatatcctttcataatgactggagttgtgcactggaacatggcggtgctgcctccaccctctggcctacccccactttcctctgctgtgcccctgaggggacacttcagtcagccctgtgggcaaactcctcccacccctgtacgacagccatccctagaccacccctcagcccaagggcatgcgcacttgcagcttggtcggccctcaggaggatggacagggcaaaggcttcctcaggccttggaaataggctgaggtcacttggatggggaattctggggaccaggagacggccaggactggagtgagtccattgaggccctcacccaggtgcaaaaatgaaggtacacacatacaacaaaactcagtaataaacataggtgatttttttttttttttttgagacagggtctcactttgtcacccaggctggagtgcagtggcgcaatctcagttcactgcagcctctatctcctaggatcaagcaatcctcccacctcagccccctacataggtgggactacagacatatgctgccacacctggctaatttctctggttgttggggtagagatggggtttcaccatgttgcccaagctaatctcaaactcctagcctcaagcaatcttcccgccttagcctcccaaagtgctgggattataggggtgagccactgcacccagcagatagagatgatactttaatgcaatattttaaaaatcaaaattaatgtaaaaatccataataaacaaaatatcaaatttttaaagacaggatcagtattactgattttatttatttatttatttatttatttatttatttatttttgcctcaggttccaataagatcttacacagctctgggccaggaacccagagcatgtgtagaagggagggcgaagtgggctctgcaggctctgggcatgcatatcccagggaatctttgctctgtggggctgggagcaaccagaagctcccagaacaggctgcagaacagggacctgtcttgcctggagcctcagtgtggtattacagtaactgagagctccgtgagggcttcagcatctagtggagtctctagcacttagtaggccctcagtgagaaattcttgaatatgtaaatgaataatgctgacttttccaaaatcaccattgcagtcatattcattacaagggttactaggacagccgctctcagcacagcacgctggctggaggctgagtcagggcatgagtaggggctggcgagagtggagacagggaacctgccaagacttagaggagactgggctaggatcttggaacgggtgatatggaggtcaggggtctcagtgactcaacagagcagggtttagaaggcaggagggagggggaggagaggcaggattatggtgagggatggagggggagggcagagctggctcagggaggaccaaggggcaggcctgggagtgagcaggagtggaagcagggaagggagtggtagacccctgcaggaagagcccagggctctggaaggagtgaggggtgtggggggcatgtttctgctcagtcaacagaggcctggagaatcaaaggctcccagaagcccagaccaggtcagttcatcaaggaaggttctcggcagccctctccccatcctctcgggttacacactggtgttccctatttcaggccctcgcacttgccaatggcccagcctctcctcccctctcctgcccccactttccccagggagggacaaacacacttgatatatgaagtgtttccacctagacgcttgggaatcccacaaagccttcagtgtgtgacagcccctcccccttcctcccccagccctttcctctcctccttctgtctgggagtctgggaatggctcctttacctgggagtgtcacagagaaggggggacatgcggtggttggggatgttcctgggcctcttaagcccaagatcgggtgggtgaatgtggtgagtgttgggggcgcagggtgatgatcgctggcttctctggcttcccagaggctggaggggcttggtttctatgactgcctctctgcccaccctgcccacctccctccttgctgctgatgccccatccactggcccgggggagtgttgcacaccccgctttcctccacataggaacccagaggagagagaaaaccaaattgtcaaatgctccctatgtgctaggcattgtgctaggccattttacaaaaataatctcagctccttcctggaaagcttgtgagagtttacagctgaagacacagcgaggcgagtatggcacactgatcaagaccatggacttggatggcagacagacccgggaccagatcccagctcttggcctcatcagctctgtgaatggggcaagtttctttacctctcctcccccaagcctcagtttccccatccctaaaggaaggatgtacagccctccacagagttgttagaagtattaaataagatgggtgtggtgtctcacacttgtaatcccagcactttgggaggccaagacgggaggatcacttgaacccaggggttcaagaccagcctgagcaacacagggagacctcctctctacaaaacatttacaaattaaccgggcatggtggtgcatgcctatagtcccagcaatgtgggaggctgagatgggaggatcacttgagcctgggaggtcgaggctacaaagagccatgatcgtaccactgcactccagcctgagtgacagagcaagaccctgtctaaaataaaataaatgatattggccgggcgtggtggttcacacctataatcccagcactttgggaggccaaggcgggcagatcacttgaggccaggagtttgagaccaccctgggcaacatagcaataccccatctctaccaaaaatacaaaagttagctgggcatggtggtgcacgcctgtagtcccagctacttgggaggccgaagtgggagaatcacttgagcccaggaggcagcagttgcagcgagctgagatcacgccactgcactccaacgtgggtgacagagcaagactttgtctcaaaaataaataaataagacattgttcatgaaatacctggcaaccagccttggtaggtgctgagattataattgttgccacagtcccatccccgtctctgggcgctctctgccaaggtctgtctcagaaggcaggggccgtgggccctgtggcataggcttgcccctggagagcggggttgggcagaggaagcacctgcaggggagaatgccagtcccaggagccctcaatggaagcacagcgacaaaggcgatggtatacttgactccaagagcctgaagtcagggggcgcgggggacacagacatcccacctcccacccacaagcaggggaggatccctgacatcgcagtgggtggtggctctggcccagggctcctcctctgactcaaggagaagccgcagctggccttgggccacaccagccacttacatggcccacacacaacctgtgtacatcactctaactcctctcgccgccagcggtacagtgaagaggggaaacgggaacacgtggatgttgggaataacgtgttacgtgtgaatgagccagttcgcattgagcctgcaagcgcaggcacccggcacccatgtggggagtacatgtggggtgtatgtgccttacattttatttctacatgtgggggtgcatgtgtgcgtacatgcttgtggccgcacaactcccagactcaccctggggtctccgggtgcatgtgtgtgccatgtgccaggatgtctgcatgtgtccacgtgtgtgactgcttgtcaaacaaactccctggagctagggctctgcaggaagggtcagacggcagtctgagacacttttcatgtgtcaggaaaaccaggctcccctttcaggaagcctgcccaaggaaaataaactagcccagctcctggggcagagggggagggcgcagggggtggggaaagagagaaggtggctgagacgggtggcgggggtcacagagcaaggccgtcaaatgatgcccctttgaccccactccatcgaccctcctggagaccctcttccctcagctttgtcctaagggggctttgtcctctttctcttcttcaggctctgttttctcctctccatctctcttctgtctccacgatttcttctctgccttctttttcatttgcccttctccctccatgtttctctctcccaactcccattactttgcagctggcggcctgccagtcacctgtctcctttcttatctccactgcagaagccaaagccgtggtctacctatgagaacaggtggtcagaaaatcccgaaggccacggtgcaggtttttattaacttttatccttcgatgccaggttggctgcaagtctctggccattacctccaacatggaggtgatctttcattcaccaactggctaattgatgtcatcttttatcttatattgattaagcacctggtttgtgccaggcactgtggttggctctagagctgccgtggtgggcaataagcgggagaaatgaatgggttctgcctcgcagaactttcagactgatggggagtcagaaattagtcaaagtcacacacaaatgtaaaagtaacttaagggctgcagacagaggggtaaatacctgtatataagagccgctaatgagggaattaacataggaggatgggaaaggttttgtaaggaagtgatagcctaggttggagggaaaagcaagagttaatcaggccaaggagtggagggggtgagtgtgcatgaggcagctggtggtaggcagagggaacagcaagtgaaaaggccctgaggccagaggaacaaagtccatttgtgtaactgaaataaggcctggaagagagggggatctggatgaggctggaacagtagcctgggctacattaggggtcattcatcaccacggaaatcatcttgattaaaaagccaatatgttttataagtgtgatctattttataatttttggctttagagatggtcactgtcgcccagactggagtgcagccccaacctcctgggctcaagaaatcctcctgcctcagtctcctgaatagctgggactataggcatgctccaccatgcttagatgattttttttaaatttttggtaaagatggggtcttgctatgttacccagtcttgtcttaaactcctggccaaaagcagtcctcccacctcagcctcccgaagcactgggattataggtgtgagccactgcacccagccttataatttttagaagttaagaaagtataatttatctttttttttttttttgagactgtgtctttgctgcccaggctggagtgcagtggtgcaactgtggctcactgcagccttgctcttctgggctgtggtgatcctcccacctcagccttctgagtagctgggactgcaggcgtgcaccaccacgcctggctaaattttctattttttgtagagatgaggttttgccatgttgcccaggctggtctccaattcctggcctcaagcaatcctcctgtctcagcctcccaaagtgctgggatcagaggcatgagccaccgtgcccggccagaaagtataaattaatcaagaagttttaaataattttatgttttttttcaccacaacaccctccacacgtatttggagaacaatggggcacaaacctaggcaagagtggaaaatattaatgcatggtccacataggatgcttggtccacttataattcccagaatctgtgcagattgagggccattgtgctggagaagagaggaaaggagggaatagagcgtcaccccagtgtgttgcaggggcctgggccagacagaagaaaccaggctgagccctgttctacacctccccactcggactcccacacagggtccctcccaccgcagggtctgaccctggccctctgccatgcccaccatgtgcttagcccctaacagctggggtggcttgtgtttagggaggggagagggatgagacagctgaccagagaggggagaaagaagcattcaagtgctactcaaagtggggcctgtgcaccagcaccagcagcatcgcctgggaactcactgggaattccaattcttagcccccaccctagacctgctgatccaaaatctctgaagtgaggccagccttacagccccgtgtgttttcacaagcataccaagtgatactcaggcactgctgaagttgaaggacccacactggagagggcaaaatgttggaagtgctcaaggctgaatcagcgacaacaggagttgagtcctccatccagctgtcatctgttgccacctcctctatgtcacccaagccattttcatggaagcctttttgttggaaaggcacagagatggacatgacctggctgtcttaggccagcccctcttgattctctccccagtctctgtctagcctcttgttctgggtgggtggagagtacccccctcattctcgtccatgagtgtggggatgggagaggaagcgtctcaggagggatgtcaggcaaggcttcctgcagacccagctgtcccttccaatccacatcccaccccctcacccaactccctcacaacaagcacacccagcagctgcagcaaccaccctggcccaatgctggccccaatgtccccaagctcaggggaagtggagttcaacccgttcttccatgactgctcctcccaggcctccccaaggaacccagacccaccacagcctgaaccaagacatctcctgaacccttttctccctcccctcaaatatcctcttctggagggcattgggaaaagctgccaaaagtcaggtcctcacccgagaacccccaacctgagccccaaacctagctcctcaggtcacagccactcccagcgaacaccacccctcgctgtgggtgggatcccatcgccacacaggccaggcagctgcctggaccacctgccccaggagagaccaaatggaaggccaagaggaagggcagcggtggggaggctctgggggagaggaagcgggggcgaaagggctggggccaggaagtctaggatgtgggagctggaagggatctgagggatcagctcatgacttttacaagctcagagaggttgtgtcttgctcagtgtcacacagcaaattggtgtcagagcccagcacaaacctgatctcccaggccaatgctctttccagacctcacccagaggggaaaggtagccaggggtaactgttcaatgaaaagctgcagcctacactactgcagcccacactactgcagcccacgccatcacacaagatcttcctccagggagctgccccagtggacgcctcatttcttctcccctatcactcattccactactcacaactgcctagaacttgatccattagtttatctcacattcactccatcttttgtctttgtttttgtttttgttttgagacagttttgctgttgtcgcccaggctagagtgcaatggcgcaatctcggctcactgcaacctccgcctcctgggttcaagcaattctcctgcctcagcctcccaagtagctgagattacaggcatgtgccacacccagctaatttttttgtattactagtagagatggggtttcaccatgttggccaggttagtctcgaactcctgacctcaggagtccgccttggcctcccaaagtcctgggattataggtgtgagccaccacgcccggcccacttcatctttaaaactctctgtgtcgtaggagagagggagagggagagagggagagagtgtgtgtgtgtgtgcatctgtgtgtcttgccttcaccatcagatgagggggtttcttagacagagggtatgtctccaccatcacactgggcgttcctagaggacaaatggtgtctcccttcggttagaacaggagcttcctgaggtcagggactgtcttccctactagactggggttccctgaaggcaggagctgagcctccagaattttgtgggtctccttcccacctccgcagttctcttcaactgagacagccctggtgttagactttaacaggaggaggccctcagagtgcctggttcagagaccacctatgacagaaatgccgctggcatttgaagccactgggactaccacctcgggacatgattggggattctcggacagctcttattctttgcgcatcccgagatttccatttgttgtctcagtaatcaccagccttggtgttctgtggttcctgttccaccaaccctccagggaaatcctctctgaagttttgaagagaactcaccatacctaagctgaccctctgaacaaagggaggcttgtggaaacaaggggttagaggagagggttttcttcttctccttcaccaaggcttctggggatggctaaggccgatgactgtctctccaaagccaccctccaccccgcccctgtcccgcgttgaccttccttctaatataccagcccgaagtcacaccttctcccaggaagggttggaccgcagttcagcagaggccgtgcaagcgaaccctctctctaaggaatggtcatggcgtcttcctccctgtttcccaaacggggtgctgggattttcgtcacaggtcccaactttcccaagttccagtagaattcttcctggaacctttctggtatcatcaccctgtgcatctaacagtcttagcccccagctggagatgtggcagggcctgagtgagagcagtaagtacaaggggacctcagctctgtaccagatgtaccagagcatccccccacagctgtctatcacacggcgctgggcctgacaggagacaggtcgctgccaagatggcatcctgagaacacacatgtaacaggcgggcaagcggtgcttcctctgccaccctccatggcaccaagttagaacactactatgaggtacataggacagacccaatgcccatctgtggataaaggaagtaaggctcagagagattaagctgggctcagtggctcacgcctgtaatcccaacactttgggaggctgaggtgggtggatcacctgaggtcaggagttcaagaccagcctggccaacatagtgaaaccctgtttctactaaaaatacaaaaaatttagccaggtgtcatggcgggcacctgtaatcccagctactcaggaggctgaggcaggagaatcttttgaacctgggaggcggaggttgcagtgagccgagatcgtgccattgcactccagcctgggcaacagagcgagactctgtctcaaaaaaaagaaaagaaaagaaatagatgcaaggccccatgctattcagaagagctggaacatcatgccaggcctacatttggtttcagtgtcatcaccctttgtgccacatcttacagcagtgccagcttggaaccaaactcaggcccccagactcccagcctactcccaggagcactgtgtgtagctgagcaggtcatacactgcacaaccccaggattgtgctcctcacattgaggtcagggcagatggcgtcccctgtagctgttgcaggacatgacccccatggctccacgtggaggtcctgcctccacactcagtcctcagcaatctgtgcacacattcaacacttgggccacacaaatccatcccctccttctcctcttctcccactagccagagtggcaggcagcaggagctcttgggggcaggtggggatccctgaggagtgtacacaccacctcccaggaccaccatgtgctccctgcctctccatgtaggagcgctttctgccataccccccataccctctgtacctccccataccccagttgccccctcactgtgcccacacccctgcctccacactcatccccacacacatgtgggtacatacacccacacacacatgtgcaccatgcaagtgaagtgcagggccccagatctccaagctcctgtctgagactccaccaagcagggggctgagggctgagggctgggggctgggggctgggggctggcctcccttagcagagccctctccccctctactcgtgtgcagggccctggcccctcccggggaacaaggctgggattaataagcggcctggctctctcccctaatgggctccagctgcacaaacattcccagaattcagagccggctctgtctggggcggcccaggcctcagccccagcattcctggccccctcccccaaggcctgggccagctgctccggaactccagcaactggctggggatcgaatcccaattcagcttctccagaggtggggggcagtggagtgactggggctggggtgggaggtgaggggacaggaagaggtgagtaaactctgaaaggacacctccctacctgcccttcccccgcctgccaggcccacccctcccccaacactgctcacacccttagcctaggtgccagggcccagcttggtcttccctaatttgtctcaccaggcagggcccttggctggcagtgccaggaggaggtaacccaggcagggctaggagaaaagataaacatctccccttgtgttttaagagatccagctgggtctccatggagtctatggcctggcagcagcttagtttaaacagattcttatcaagcagtgggaaggggtggcaaagggagcaagaggaagaaggaaagtaggggttctcaccctcccattatccagctgggagtgacactcagggccccagtgggaggaatcctaagtggacaaagatgagcccgtgaggatgatggctctgaacctgtcttcccagatcccaggctacaggggtcagtcattccactgtccctgatctgtccttgatctgttgcccccagttacgcctgctgtggacaccaagggctgaggccatggaaggagtcccatgactcctgttggtgccagggtccatctgagcagggactagtggagagcacgccacctaacagaggtgtgtgtggctgtgtgtgtgcctgtgtctccctggccaagcggaagcagctgagtcaagtagcacctgcatgtggatgtggcagtgtgtgtgcgtgtgccagtgcacgtcagcctctctgtgttcaaaaacgccgtaagctccacgctcactcagaaaggctgcctgctggccacccctccccgaagctgcaagtgtccctcccacggggcatgcgccagagagaggctgagaagagaaagtagaggacaaacaaaagagaggtagtgccgggagtggtggctcacgcctgtaatcccagcactttgggaggcagaggcgggcagatcacttgaggtcaggagtttgagaccaacctggccaacatggtgaaatctcatctctattaaaaatacaaaaattagctgggcgtgatggcacacgctacttggaggctgaggcagaagagttgcttgaaccagggaggtggaggtcgcagtgagccgagatcacgctactccacaccagcctgggcgacagagtaggacttcgtctcaaaaaaacaaaaggttgatgaggcgagagctctgagggaggctgtgcgggcagctgaggcactgacttgggagttaggaaacataggtcttggcctcaactctgccagagaccagccaggacgttggatgtttcacttccctgatcagtatccttcccttgaataagagaagattggacaagagtctctcctgagtcccttcttggattccactgtgatgacagctgggttgggggacacgggaggatgctacatcctctcagagctgcaagaaaggggctctggaggggccaccaagagcagcctatagggactgcgtagagggtccctagtctctctggccctgaagaggaaattgagaaaggggtgtgctccctgtcttggggagtcccgttctgcagggaaaccaagtacaccacaacatggagacagataaaggcaggtgatctcaattggctgagctcttggcggccgtcctgggttgaaggggaagagggccattgagccaaacaacaaggatctgtttactctctactctctttttttcacgtgcacacagcaaacacatgcggcccctcctcaggcctctgcaggccaaggaatgcagacccaccgctccaggtcttggtccccatcaatcacactgcccatgcatgtcacatcacctgcttccttgcagttctggccatttccccatggaggcacagagggaatgacactctgacagcatttgagccctttaactcatcattgatctgtatctccactccccaccccacccccagctatgggaccagctcctgagctgcagggaaacagtaaggtgagacctcctttgcatacatggagaaactgaagggctctgggtgggacgggaactcaggaattggaccccatttaggactctatccaagtgagcctcatctagctgttcatctggcatttcgtgaacacctactttgtattcagacttgtgttattaatagaagctgaataatacaaagaaataacatttctcccaggggtatcaaatcagaggaaaaaaaatccttcccccaaaccaaaggtggactggaacctaccatagactgaccaaagaaacagagccatcaacatgctattgaattttagagctgtttatttgggcaccagagaaacagcagaccagatgcctgaacttcccaggctgaagctctggactacaaagctgtagacgcttagcaaggaaacaggaaaggagggaagcagccggccatggttgtgaaattctgaggtctagaaccctaaggcaacaaactgaacccaaagcctctctcctctactccccactcccttcatttttcagttatctattgagtaaataatccaccccaaaactgagtgcttacaacaatacaagtttttcttttcttttcttttctttttctttttttttttttttttttgagtcttgctctgttggctagcctggagtgcagtggcacgatctcagctcactgcaacctctgcttcccgggttcaagcaattttcctgcctcagcctcccaagtagctgggattacaggcatgtgccatcatgcctggctaatttttttattttttattttttatttttagtagagacggggtttcaccatgttggtcaggctggtctcgaattcctgacctcaggtgatctgcccgcctcggcctcccaaagtgctgggattacaggcatgaaccaccacgcccagccaataatacaagtttttctttgctcacaattctacaaattgggcaagattcagtgtggacagcttgccacactggttctggagcatccaagatgcttcacaaatatatctggcccctctgctgggacggctggaggagaagggggctggttggggctctctcttttccttcatagtctctcatcctctggtgcttctccctcgctctctttccctatagctccctctcctccagggtggccagacctctttacatggtgactggcttccaacagggaagaagtagaagttgtcaggtctcttaagacctagacctcaggttgggcgcgatggctcacgcctgtaatcgcaacactttgggaggccaggtggaaggaacacttgaggccaggagtttgagaccagcctgggcaacatggcaaaaccctgtctcaaaaaaaaaaagaaaagaaaagaaagaaaaattagccaggtgtagtggcacaggcctgtagacccagctactcaggaggctgaggtgggagaatcacttgagcctgggaggcggaggttacagggagctatgatcacaccactacactccagcctgagtgacagagacctgtctccaaaaaaaaaaaaaaaaaaaaaaaaagacctagacctcacctgtcagggcatcagtgttgctgccaccattggtcagagcaaatcacaggccaccctggattgattgatttattaagtcagagtctcactctgtcacccaggctggagtgcagtggcgcacttggcttgctgcaacctctgcctcctgggttcaagccactctcatgcctcagcctcccgagtagctgagattacaggtgttcactaccacgtctggctcatttttcatattttttgtagagatgtactttttgttggattttgtcatttttcgtattttttgtagagatggggttcaccatgttggccaggctggtctcaaactcctgaacccaagtgatctacccgccttggcctcccaaaatgctgggattacaggcatgtaatcaggtgcccggctccaccctggatttaaggagacagaaaatgcactaacggagcagcatgcgcatgaggggacggcattgctggtggcccatcttcgcggaccaccccgccatccccctaacttggctccccttttgttcctccttggcacactgaagcactatctcctctctggagtgtcgtccttcttcttctcctataccccatgtccaatcagtccccaggttctgttattgatgcctcctccatgtctctcaaatcattctttttcttttcttttctatttattttcttttcttttccttttctttttgttttgtttgtttgtttgtttgttttttgagacagagtctcgctctgtttcccaagctggagtgcagtggggcgatttcggctcactgcaaactccacctcccgggttcaagcaattctcctgcttcagcctcctgagtagctgggattacagaggcgtgccaccatgcctggctaatttttgtaggtttttttttttttagtagagacggggtttcaccatgttggccaggctggtattgaacccctgacctcaagtgatccacccgccttggcctcctagagtgtaaaatcattctcacagtcactaccatccgctgttatccagaatgctcaacggcttcctaaagggtctcctgttttcactcttgcttcaataccatgttgcttttcaacttgcagccaaaatgagcattccaaaggctacacctgtggggtgctggatggccggggacaggaaagtcagggggatttgtgctttaatatgtgctcttttgtaccatgtgtgtacctttgcaaaaactaaaatgacttttagggcctggtgcagttgctcacacctgtaatcccagcactttgagaagccgaggcaggagcatcgtttgagcccccggagtttgagaccaacttgggcaacacagggagaccctgtctctacaaaaaaaaaaaaaaattatttacgtaattttattttattttatttttggagacagggtcttgctctgtcaccgaggctggagtgcagtggcacaatcttggcttactgcaacctctgcctcccgggttcaagtaattctcatgcctcagcctcccgagtagctgggattacaggcataagccaccgcacccagccttacacaatttttttttaattagctggccatggtggtggtgtcccagctacatggtggagggagggtgggggctgaggggggaggatcacctgagcccaggaggtcaaggctgcagtgagcagtacatcactgcactccagcctggggcaacagagtgagaccctgtctgaaaaaacaaaacaaaacaaaaccccccacacacaaaacaattgactcaaaatcaaatttaataataaataaaataaaccagatcctcactgtgtcactcttctactggaaactcctcagtgatggtccatggctcccaggataaaatctagactctcaatggagcttagatacctttcaagatctgccgcgcctggccctgcaggcactcttctcaattttgcgctctatgttccagtcgagccgaacttctctgaatttcttgcatttccttgaaagtacaaattctctcttgcttgcagcttttgtacaggtgactgctcacaacactctatttattcttcaggtctcggctcaggtgtttcctccaggaagtatttcatggtccataaagttggggtttgaagtctcttctacaagttcccatagtgcccttgacttttctagcattctgctcatcacattctaccgtctttttgtttgtttgttttagacagggtctcactctgtcacctaggctggagtgcagtggcgcaatctcggctcactgcagcctcgatctcctgggctcagttgatcctcctgactcagccttctgagtagctgggactacaggtgcatgccaccacactggctaatgttttgtattcttttgtagagacaggattccaccatgttccccaggcttgtctcaaactcctgggcacaagggatccaccggccttggcttcccaaagtgctaggattacagaaataagccactgtgctggcctgttttgttttgttttgttttgttttgagacaagatctcattctgttgcactggctggagtgcagtggtgcgatcatagcttgctgcagccttgaactcctgggctcaagcaatcctcctgcttcagcctcctgagtagctggaccacagatgtgcaccatgacgccaggctgagtttttaaatttttagtagtgatgaagtcttgctatgttgcccagactggtctcgatttcctgagctcaagcaatcctcccgcctcagcctcccaaagtgctaggattacaggctgaggcaccacacccagcctcacactctattgtctttacctggttcttcacttgtccctcccaccatagcatacacttccaacagggcaggaaccaagactgtgatgctccctgctgcttccctaacacccgtgcaaaggtgcttactacttaccgatggagggaggaaaaggagagggaggaagaaagaaaaggaggagagagaaagagaagaaaggtaagttggtttaaaagctgcagcaggtcaggaagctaattttggaatatgaagtggggagttttactgtaaggaattatgtggccatgtggactcaaccatgtgaataaatatcatagacattagatacaaaagagatacaaccattacatgattccttttctagaagttctgtaacaggcaaaattaatcaatagtgataaaagtcagaatagtggttacctgtagcacagtactcactggaaggtagcaggagcaaaatgttctctctcgttacttaggtagtgtttacatgagtgtagacacatgtaaaaattaattaagctggctgggcacggtaatcctagcactttgggaggccgaggtgggcagatcacctgaggtcgggagttcgagaccagcctgaccaacatggagaaaccctgtctctactacaaatacaaaattagccaggcgtggtggcacatgcctgtaatcccagttactcgggaggctgaggcggaagaattgcttgaacccaggagcagaggttgtggtgacctgagatcgcaccattgcactccagcctgggccacaagaatgaaactccatctcaaaaaaaaaattattaagctgtacttaaaacttaaatgcactttacatcctgggcaatatggcaagaccctcatttctacaaaaaaaaatttttttccaaaaagctgggcatggtagcacatgcctgtggtcccagctacttgggaggctaaggcaggaggatcatttgaacccaggaggttgagactgcagtgagctgtgtttataccactgcagtccaacctgggtgacagagcaagaccctgtctcaaaaaaatttttaaaaagcactttatgcattttagtctatgttatttcaataaaaattagaaaggaaggaaagaatttaaaaaggaataaataaaattatttaggccaggcatggtggcttatggcttgtaatcccagcactttgggaggccaaggtgggtggatcgtctgagctcaggagtttgagaccagactggccaacatggtgaaaccccatctctactaaacatacaaaaattagccaggcgtggtggtgcacgcctgtaatcccagctacttgggatgctgagacaggagaattgcttgaacccaggaggtgaaggttgcggtgagccgagactgtgccactgcactccaggctgggtgacagagcaagactccgtctcaaaaaaaaaaaaatttggctgtaaattgaagtcaactgcctagttgagtgagagtgataaagcagttacaatctaggactaaggcatggaactgggatctaggcagaaaaagcagtgtcacacgtatgtgtacacacgtgtgcatgcaagtgagtgaggaaactggtttatattgataggaagaaagtactgcaaaataaactgctcatcactcttcatgcacttcccattccctcccaaagcctccactggattttccattactacacttaaagcccagactccttgacctcacattaaagctttcttctatctgcgctcccaaccgtccttccaggtctgtctccctttcttcgtgccctctctccccacatccaccacacaatgcatacttctttgtactttttttttttaatttgttgttaaattattattattattattgaaacaaggtctcactctgtcgcccaggctggagagcagtggtgcaatctcgacttattgcagccttgacctccctggctcaagtgatactcccacctcaacctcttgaacagctggaaccacaggcaagcactaccacgccctgctaatttttgtatttttggtagagatggggtttcggcacgttgcccccgctggtcttgaactcctaagctcaagcaatccatctaccttaacctcccaaagtgctgggattacaggtgtgagccaccacaccctgccgttccatgcgctgtttacctgtatgggtgtaccagtccacagagagatcagctattattgccttttccttattgaactcctactcgccattgtggattaactgctcctctgtcgttcttttcatggccctttgctcacagccagatagcatgtaagttgacctctggtagatcacagctatttgtgtatgattctgtctccgtctgtaacataagccctccagaagtcagggacaatgtcagtgcccaaacctacagctctagctcccaactcttgtcggcatcacaaccacatttgcaactgcctactagatatctcctcctcaaagtatatgtgttcaaaactgagttgattatagataacccagaaataaactctcacatatatagttaaattatttttgacaagggtggcaagaccattcaatggggaaaggatagtcttctcaacaagtggagtcggaaaactgagtatccacacacaaaagaatgaagttggacccttacacgtcatatacaaaatttaactagaaatggatcaaagggccaggcacagaggctcatgcctgtaatcctagcactttgggaggccaaggccagtggatcacctgaagtcaggagctcgagatcagcttggccaacatggcgaaaccccctctctactaaaaatacaaaaattagttgggcatggtggtgcatgcctgtaatcccagctactcaggaggctgaggcaggagaattgcttgaacccgggaggcggagattgcagtgagctgagatcgagcctttgcactacagcaacctgggtaacagagcaaggctccgtctcaaaaaaagaaagaaatggatcaaagacctaaatgtaagcagaagcttcacttcactggatttggcaatggttttttggtatgacgttaaagacacagacaacaaaagaaaacattgtaaattagatgttacattataaaagtgtaaaatttttgtgcattaaaaacaatatcaacggaataagaaggtaacccacagaatgagaaaaatatttgtacatcatatatctggtaggggattaatagccacaatatatagagaactcctaaaactcaacaacaaaaaagcccacctgatttaaaaatgggcaaagaagccgggtgcagtggctcacgcctgtaatcccagcactttgggaggccaagatgggcagaccacaaggtcaggagatcgagaccagcctggtcaacatggtgaccttgtgtctactaaaaatacaaaaatgagccaggcttggtggcatgtgcctgtaatcccagctactcgggaggctgaggcaggagaatagcttgaacccaggaggtggaggttgcagtgagccaagatcgcaccactgcactccagcctggacaacagagcaactccatctcaaaaaataaaaaaataaataaaaatgggcaaaggagttgaaaagatatttctctcaagaacatatacaaatggccaataaacaaatgaaaaaatgtttaacatcactaatcattagggaaatgcaaatcaaaactataataggtggccaggtgtagtggctcacagcactttggtatgccaagatgggtagatcgcttgagcccagaagttcgagaccagcctgaccaacgtggaattacaggtgtgagccaccacgcccggccccaaaattagtagtggttttttgtttgagacagtttcggtcttgtcacccaggctggagtgcaatggtgcgatctcagctcaccacaacctctgcctcccgggttcaagcaattctcctgcctcagcatcccaagtagttgggataacaggcatgcaccaccacgcccagctaattttgtatttttagtagagacagggtttctccatgttggtcaggctggtctcaaactcccaaccttatgtgatccgcccgcctgggcttcccaaagtgctaggattacacacatgagccactgtgcccagcaagctctacttcatcttctgaggaacaaatgagttaatacatgtcaaacacttagaacagtgccacatatataaacttaatttttttttttttggacagtgtcttgctgtgtcaccaggctggagtgcagtggcctgatcatggctcactgtagcctcaacccttcctggctcaagcaatcctcctacctcaatgtcctgaggagctgggactacaggtgtgcaccaccacgcctggctaattttatttatttatttatttagagatggagtcttgctctgtcacccagtctggagtgcaatggcgtgacctcggctcattgcaacctccgcctcctaggttcaagcgattctcctgccttagcttcctgagtagctgggattgcaggcgcccaccaccacacccggctaatttttgtatttttagtagagacggagtttcgccatgttggccaggctggtctggaactcctgacctcttggtccacccgccccagccacccaagatgctgggattacaggcatgagccaccgcgcccagccaatttttttttttattttgagtagagacgaggtcttgctatgttgcccaggctgctctcaaactcctggcctcaagcagtcctcccacctcagcatcccacggtgctaggattatgggtgtgagccactgcgctcagcgatagcttaataattattattaccatttgtttcagttatctattcctgcataacaaagtaccccaaaatttagtagcttaaaacaacaattgttttattatatctcacgattttatgtgtcaggaatttgggcagggcttggctggggagattcttccgctccacactccacaaggtgttgataaggacatttgatgatattcagctggcagatgggctggtcaggagaattcaaaacagtttcacctacatgtctattgtattggtgagcatggctaaagttagaactattggccgggcgtggtggctcatgcctgtaatcccagcactttgggaggccgaggtgggtggatcacctgagggcgggagttcaagaccagcctgaccaacatggagaaaccccatctctactaaaaatacaaaattagccaggcatggtggcacgcgcctgtaatcccagctacttcgggggctgagtcaggagaatcgcttggacccaggaggcagaggttgcagtgagccgagatcgtgccattacactccagcctgggcaacaagagtgaaactctgtctcaaaaaaaaaaaaagttagaactattaactcaactagaactattaaacagaacacctccatatgacctctttagcatagtgaactcagaatagtctgacttcttacatgacagctcaggcagctcaaagggcacgggtttgagcgttacaaggaccaaggttgaggctgcatgagcttttttttttttttttctccctgtagcctcaacctcccaggctcaagcaattttcccccttcacctcctgagtagctgggattataggtgggcaccaccacgtccagctaattttttaatttttatagaaacagggtctccctatgttgcctaagctggtctcaaatttttttttctttagagacagggtcttgctctgtcttccaggctagagagcagtggtgaaatcaaagctcactgcagcttcagactctgggctcaagcgagcctcccaacttagcctcctgagtagctgggactacaggcatgcgtcaccacacccagctgattaaaacaattttgatagagacagggtcttgctattttgccccagctagtcttgaactcctggattcaagcaatcctcccgcctcgacctcccaaaatggtaggatcacaggcacgagccactgcacctggccctgcaaaggcttttataacctagacttggatgtcacatagagtcactgccaccatattcagttggtcaaagtagtccagattcaaggcaaggagacacagaccttacctctgaataggaggagtgtcaaagaatttgaagttatacattaaaccctcctcactttttgacccccaaaagaagtttcccggagggatgaactccagagggatgtcgatggaacagtctatccttctttctctgacaaggaattaggattatatctcctgtgatttagaggcaaccatttcacacccttccctggaggtgtgcgggtatagcctcacccatatccatccacatgcacacacacaggtattcacacaggcagatctggtacatctgtgtagccagccctctctccatttctatccgtttttcaggtcaaggagacccaaagtcctgccctagagtttttcctgggaagttaattaactgaccattcctgctcccactagtgtgaacagggggtgtcggtagggatgaaacccagtcagtcactgactggggagtctgactttgatgtgttctctggggtgtgcatgcacgtgtgtgcataaatgcctcctggttctgactggctcgagtcagtatagaagtaagttctggtgctaagagcaggctggatggctcacacacattctataaatccaaggaagccaaagtgagatccaaattctgcaggggtcagcccaaatcctccatctaaccagccctgccacactcttccccatactcatcctctgtcccatgcgtactcaccgctccctgatcatgccacattcttccattcttctgcagctttgcccatactgttctctctgcatggaatgcccttgccccctctttttcctgacaaccctagtgtctgccttttgtatcacatgatattgcaatgatctgtatatattattattattattattttagacagagtctcactctgttgccaggctagagtgcagtggtgtgatctctgttcacggcaacctccgcctcctgggttcgagcaattctcctgcctcagcctcccgagtagctgggattacaggcatgtgacatcacacctggctaatttttgtatttttagtagagacagggtttcgccatgtgggtgaggctgatctcgaccccttgacctcagataatccgcctgcctgggcctcccaaagtgctaggattacaggcgtaaaccaccatgcccggcgatctgtatatattaatagctccactttcctcaagagcagagaccatgctctactcattgccatatcactagtgcttggcacacaataattttcaacaaacactggttgaactaatgattgaatgaacagctattgctcccagattcagcaactatttctcctccatgtctttgctctgtccaactccaccccaattccccgggctgctatgagaaggggcaagggtcccaaaggctagagtgtaaagtttgggctgcattcttgaggccccagggagattctgcagagtctccgaaaacagggaaggattccatgttgtagaggtgggcccagcaggcccacaggccctcacacccatagtgggaaaagccagagaattctgcagggtttttctaatgttggggaggatgtctcaaagtccgaaatagcctgtaaacattgggttaagtgttagggtctgctgggaatacttagactgggactgagccagtaccctgctggaagaaaataattctggctgctgaggtgggggcaggtgcagttgaaaaaagcagtcctcaagatcagtgctcctggctgggcgtggtggctcacgcctgtaatcccagcactttgggaggccgaggggggcagatcacttgaggtcaggagttcaagaccagcctggccaacatggtaaaaccccatctctactaaaaatacaaaaattagccaggtgaggtggcttacacctgtaatcccagctactctcctgaggcaggggaatcacttgaacctgggaggcggagttggcagtcagccgaggttgcaccactgcactccagcctgggtgacagagcaaaactccatctgaaaaaaaatgaaataaaagatcagtgctcctcacacttgaatgtgcaaattccctgggaatcttgttaaaatgcaacttctgattcagaaggtatgaggtcagccccaagatcctgcttttctaacaagctcccaggtgatggcactgttggaagggtagaggaggggccagaacgcagttggaatcacactttgagtagcaaagacctagaaaactagcattatgatccagacgctgaggattcagcccttaaagggagtagctgccatcagcaacatcagtaaggtgttcagaagatgatgcaggagacaatacacaaagcaagcctgacaaaaatctggcccgcgtgcctacccttccattctttgattctgtgaccatggcagacatcactagtggatcccagcactatctcccactaagccaaaaggatgcttcagaatccatctcaccacagtactccaggtagtcacccaattaattacagttggcatgagaaataaccccacttgctatttctggtattgtggttaagagtctgactacttttgctccactctggctagtttgatgcccttacagcagctttcatgaacatcagttatttaaatatgttgtaatttgaggtaaagagagccctcattttgtagttttggatgttaaatgaggctgggtgtggtggctcgtgcctgtaatcccagcactttgggaggccaaggcaggaggattgcttgagcccaggggtttgagactagcctgggcaacataacaagaccccaactctacaaaaaaattttaaaaattagccgggtttggtggtacacgcctgtagtcccagctacttgggaggctgaggcacaaggatctcttgagctcaggagttcaaggctgcagtgagctatgatcacgccactgtatccagcctgggtgatggagtgagatctcgtctcaattaaaacaacaacaacaaagaacattaaatgatattatgaatgttaagtgtctggcacatagaatgtgcagatattcaataaatggtggctaggcctgtcacggtggctcacgcctgtaatcccagcactttgggaggctgaggagtgcggatcacttgaggtcaggagtttaagaccagcctggccaacatggcaaaaccccaactctactaaaaatacaaaaaattagctgggtgtggtggtgtgcatctgtaatcccagttactcgggaggctgaggcaggagaatcacttgaacccgggaggcagaggttgcagtgagccaagctcctgtcactgcactctggcctgggcaacagagccaaactctgtctcaaaaataaataaaataaaataaaataaaataaaataaatggtgactaccatgtagaggggtgaatatattgcctgcacagtttgacaggacatggtggtggaatgggaaagaggaagagagggagacaggagccagagtgctggggtggagaagaataggtgacaaaggctattcctgcctgagactgtgggcagattcccagctctctttggttggccctgggctccctactgacactaaagctctttgaaagaggtgagtggcacttgtcatcttgaaatacctgagtacagaacttcttttcaaggagagttgtgaaagactccaatatggtcaaaaagattattgtctgtccttgtgtgttattttctagttttatggtcatcgagctattttaccacccaatcaatggaaataattcttgtccatagaaatgcaaattgcctggtgcatatgcaattgattattgctcagtggttattgaccaatttagcatctattaagcagatttacttcatctttttttttttttctgagacagctctgttgcccaggctggagtacagtggtgtgatcatggctcactgcatcttcagcttcccgtgctcaagtgatcctcttgcctcagccttctgagtagctgggactacaggtgtgcatcaccatccttaattttttaaaattattttttgtagataaaattttttgtagattattttttggatctcatcatgttgcccaggctggtcttgaactcctgggctcaagtgatcctcctaccttggtctgtcaaagtgctggcattacagatgtgagccactgtgccgtgcctacttaatcactctttttgtttggtttgttttgttctaagacggggtcttgctctgtcacccaggctggagtgcagaggcatgatcttagctcactgcagcctcaatctcctgagtagctgggactacaggtgcacatcaccatgcctgactaattttttaaatttttggaagagacagggtctcactatgttgcccaggttgctacttcatcattctttttttttttttttttcttttttttgagacagagtctcactccgttcacccaggctggagtgcaatggtgcgaacgtggctcactgcaacctccgcctcccaggctcaagtgattcttatccctctgactccctagtagttgggattacaggcatgcacccccatgcctggctaatttttgtatttttagtagagacagtgttttgccatgttggccaggctggtcttgaactcctagcctcaagtgatccacctgcctcagcctcccaaagtgctgggattacaggtgtgagccacaacgcccagcctatttcatcattctggatggcctaaatacgtctctgctctttggatcgtcctttgaactgactgtaacatcttactggttccttcactaattaatgagttaaataaaaattttgacacgattattgtatatttctatgagagtaattattttgctttgtaaaaaaaacctttttttttgacattctcattaacaatgaagattgggcaggaggtttccaagaccctctgccccggacaagcttttccacaggctccaatcgccattacatctgtcaggttgttttttttgttttgttttgtttttgagacggagtcttgctctgtctccaggctggagtgcagtagcacgatcttggctcactgcaacctccgcctcccaggttcaaacgattctcctgcctcagcctccagagtagcttggactataggtgcacgccaccatacccagatcatttttgtatttttagtagagacaaagtttcaccatgttggtcaggatggtcttaatctcttgacctcatgatctgcccgtcttggcctcccaaagtgctgggattacaggcatgagccaccacgtccggctcatctgtcaggtttataggggattacccccacttcattgcttgttttatgccatccaaatagatacataattattcaatatttgagctggacacattctcaaacatttatatgagtttgtttaacaaaacatataacaaacctacaagtaccacaccaaatacttatccatgtattcattcaatgataggaagttgcatgtggcagggactgcatttgtgcctcttttgagcttagcaagtgcctaactcatggtaagtactaaagacacatccactgagccaacacatgaatgaataagcccagcaagactttactaagtgtttactatgtggtgaacattgttttaaacactttatttaatttaatcctcaaactagttacatggtaggtacaattaattactatcctcatttacacataatacagagaggtgaatgaacttgctcaaggtcaacagctagccatggctgaggcagaattcaagccctggtagcctggctcctgagcctatgatcttgggcacccatatgcgccaggcatcttgctaggttctgatatacagagataaaagacacaccaaacacagactttccttaaggaggtcacactgaagaaaggcaacaaataactaaaaagaatgtgacgtgctctggcaagtgagaacacgatgctagggacagagggtgtcagagggttggacaggtgtggttgacggcagaggggccacctgacctgaggcaagttctgaggctactggtagttaatgttcagatcagaggaagggaagagcattcaggccactggtatggttggtctgagaaggtgagagtcccgaggccggagcccagaagtgcagagaagtgaaactggagagaggagccaggtccagatcctggaaagcttcacttgctgagggaggaagggtgttgggataccccttggaggcctcgcaggactgttcgcaagggagatatgaactcagatgccacactccacctgccctgcccaggacacgaaacccagtacacagaattccctacaagctgtatcccactcgggagagttccccgggagggctagacaggagggcagtgctaactgagtgtgggacacagccagtgccacctgggagccatggctgggagtctctctccaagccctcccccacaatcccttcagtcaccccccacccacccttgccagctcagacactcaggcacactccctccggtcacatcccccttgaggccagagataagaataagcaacatgtctcttcccacatcccttccctgcccgccctctgattctaccatccaaagcagctgcagagcctggaacaccccaggccccagtcagaggagggagcatggggagatgggagcttcctgggggggccgtggctatgggctgtgccctcccctcccacagggctgaggctggtgattagttgggttaattatatccgagccatttccgattggcacaagcccacccacccacagagcctgcccagaaggcaggcaggccgggcccaggtcaggatgctggggcaccagctcctctaggtggattcctgacccctgtgctgatggccaaacggaggctgattgtcctccctgctccaggacggcctcctcttcactcaccaactttcttacccatccctctgttttctttgtaccaacacaagtccctctcactcccctctcctccccccaggtttggaatgaaatcatggggccctgagttccgcagtaggccctgacataaacactttgattggggctaattataagggccaggctgagaggctggagccttcggaaagctttggctttcaaataaagggcccacggctcagtccctagcccaggcggctctcttccaggcttccttatgaatgaggggttccagaaagaggcagtcctctagaaaccccgtggtctgtgggctcgctccatgtcccacgcctcatcttgtcccttctcggttgcttttgccttggcccttccaggcctcagatcccagggccttgccggatggcttggcagagccaccagtcggccgtggaagacaaggcagcaggggaggagctctcaggctgggaggcaggggcagcggcaggggcagggtcaggggaggcgcaggggaagccagctgtgacagcccaagccctaattagtcggcttcaaagccggccggagagagagcccgcctgcttgtgtgccctgctcactcaggcgagtaagacatttctgtcccaatcagaggagagagagaaagaaaaacacggcccaccgccaccccgaagagcctttagacactgggctggtaccccgagtcagggagaaaaactgagaacccaggaaatcattctcttctgttgaaactgatacgtaagtgctaggaagggaagtgtgtggtgcctttaaatgatacagaaaggggtaacggaagtgctgggtacaggagggcgtagtccttggctagggctccacccccacggacctaggtgaggacaggcatttttgttttcctgcccaaatgttgcgtttcccaagtccaccctgtcctgccacgcccccatcctgtgcctataaaaacccgagatctaccccccccaaggaaagccaagccaagccgctggatgttgaggaggagcacgtcagcggaggcacacacattggctaggcgttgagaggaacgcactgataggcaccggcatgctggcaggccactgatcaggcagagcaacacagagtttggctgaggcagtcagaggagagcgcgggccaccgagcggcctgattcctaggcgacaaccatttaccttctggctgtcccatattctgagagcgacttccactcaataaaaccttgcactcatactccaagcccacatgtgatccgattctggtacaccaagggaagaaccccgggatacagaaagccctctgttctcggtctctgcgccaaggaagaagtctaattgagctggtaagacaagccacttatcgacagcaaagctgaaagagcaccctgtaacacgcgcccactggggcgccaggagctgtaagcattcactcttagacactgcggtagggccggagccccacagcctgcctgtctgtatgtctcccctagaagtttgagcagcggggcactgaagaagcgagccacacccctatcgtatgccctgcaagggggacaagggaactcttcccatttcactagcactttgggaggccatgacaggaggatcacttgaggttaggagttagaggccagcctgggcaacatggtgaaaccccatcgctacaaaaaatacagaaaaaattagccggccatggcacacgtctgtagtctcagctactcaggaggctgaggtgggagaacacctgagctcaggaagtccaggctgcagtgagcagtggtcaggccagtgcatttcatcctgggcaatggagtgagaccctgtccaaaaaaaattttttaaaaaagttgttttggtagagacagggctttctccatgttgcccaggctggtctcaaactcctgacctcaagccatcctcccctctcagcttcccaaagcactggggttacaggcatgagccacggtgcctagctaacagttttctaatcttggagaaggaggaaactggacataattatttctaagcatccttctagcatttagttttcttgctcatcgtcccagtgctccatatccccaccactaccccactcccaaacatactcatatgtagcaccaggggctgggttcctgcatgcaagtcatctaaaagtgacgctattgactgaatgactgtgacctaggaggctgggctgataaggatcacctaacaaaaaccagttactgatgttagtgcttacactaacatccccttgaaggaaaagtcttaaagccattttataaattgtcaacctatttgccctaatgtggtcattttcatcacttattaccctcctcaaagtctttattatgcagctaaattacaataatggtttaatagtttttggcaaactggaaccatgatgtcacaaaagccatacaagtaggtagtaaagatgttataaattcctcccccttttttaaagcagataagaaaaaaaaattttttttgagacagggtcttgttatgttgcccaggctggagtgcagtggtgcgatctcagctcactgcaacctctgccccccaggctcaagccatcctcccacctcagcctcctgagtgagtagctgggactgcaggtgcacaccaccacaccccgttaatttttgtattttttgtaaagaagggggctcgccatgttgcctaggctggtctcaaactcctgagctcaagcaatctgaccacttcatccccacaaagtgctgaattacaagcgtgagccaccacgccctacaagggccaaatgtccagtggcaaggccataagagctgctaagtgacattgcttcatcatgaactcatgccctctaattccacatccagggcctctgtcctctgagaacacacatccaggaccataccatcccagaggtgacctgtctttgcagctgtgaaggggagctagagctgggtgtgcccaactgattaggatttgctgaaacaatccaacccttcttccatacttaaaatcccatctggtcttcgtcccatatattttcctttccgttttaaaatgtgagtctcttctgagggaaagccaatccatgtgtttctgattcatttaaacttaatttctccaaatagcactctctaacatccctgaatttcatacatttttagaagacaggaaataggaagaggccaagtatgggcagattgggaagagatggagctcccaggcactcactgggattctcttccttaggaaaataatgtctcccatccttacagtggaggctgagcctggattcaattccatattcttgctccagctctagctaaggtgacagttataacacgtgggccagacagtatgggactccatccggcacacttttttttttttttttttttttttttggtgacggggtctcctctgttgcctaggccagactgcagtggggcaatcccagctcactgcagcctcgacttccctggctcaagtaactgggcttaagtgatcctcccacctcagcctctcgagtagctaggaccacagatgcatgcctaacgcccagctaattttttgttattttttgtagagacagggtctccctatgttgcccaagctggtcttgaactcctggactcaagggatgctccctacgtggcctctcaaagtgctgggattacaggcatgagccaccgtgccagcccaacgtggtttactatctagaacatagtaaagcgaggaattaacttgatccttgatagcttggccagggcaggaagtaaggtcacctgtgagagaagcaatgattctgtggtgcttcttgagtatctccatcatatacctcagcaggagggcttggatgctccctctaggcaaacatgactatgacaatgaagtaaaaacaaacctggataacatgatgggtgggctttgatggagaaagtatatggaggcaatatagcatgttagaaagtgctgtgtagtcagacaaaactgggttcaaagcttggctctgacaattaagcccagggactttaggcaagtcacttaacctctgtgaatatcatcagtaagcttccgctgcatgagattgttataagaattaaataaaaccatttgtagggtatgacaattaataggcacttaaataaatggcaaccagtagtgtcatattatctgaaagtaagatacagtgtgttgaaatttcttaattcaactcccacttaaatcatgccccagacagtctcctgacacgctgatgagggtctaatatggaaattttgaaagaaatcaatcaacaataatttgatgggcatgtgatggtacaaagccagtgccagatgctatggatgggtgggcaggggaaaagaaaaaaaagtagagggtttgcaagattgttcaaggctagacacagtgtctcacacctgtaatcccagcactttgggaggctgaggcagaaggattgcttgagtccaggagtttgagaccagcctgggcaacatagtgagacctcatctctactaaaaataaaaataaaaaattagctaggcatggtggcatgcacctgtagtcccagctgcttgggaggttaaggcaggaggattgattgagcccgggaggtggaggctgcagtgagcctcgattgcaccattgcactccagcctgggtgacagagagataccctgtctcaaaaacaaacaaaaaacattaacaacaacaaaaacaaggttgttcaagagacaacagaagtcatagacacttgagaagaatcacaaagcaatttagcagcaaattttcagaatccaaattgagtcttgggctactggggatgtagaatcatgcttggaggatgcagacaccctgccggaggacgatctaaatctggaaaacctgtatgattctgaactgggacttgatttttaagcttccttaatacctggtaaacctgaagcttgggattttataacaagtttattttttatgtgttaaaaatgtgtggagagggtgaaatgggaaaaactgcctaatgaatatagagttttgttttggggcgatgaaatgttttggaactagatggaggtgatggttacatgacattgtgaatgtgctaaatatcactgaattgttcactttaaaatggttaactttatgctacaatttcacctcaatttaaaaattcatagaaatttagaaataggccaggtgtggtggctcacacctgtaatcccatcactttgggaggctgaggtgggcggatcacatgaggccaagaatttgagaccagcctggccaacatggcgaaaccctgtctctactaaaaatatagaaattagttgggtgtggtggcgcatgcctgtagtcccagctactttgaaggctgagacaggagaatagcttgaacccaggaggcacaggttgcagtgagctgagatggcgccactacactcctgcctaggcgacagaaagagacttggtctcaaaaaaaaagaagtaaaaataaaattttaaaaaagctatttggcttggcacagtggcttacgcctgtaatcccagccctttgggaggccaaagtgggcagatcacttgaggtcaggagttcgagaccagcctggccaacatggcgaaacactgtctctaccaaaaaatagaaaagttagctgggcgtggtgacgtgcgtctgtaatccccgttactcgggaggctgaggcagaagaatcgcttgaacctgggagatggaggttgcggtgagccgaaatcacgccactgcactccagcttgggtgacagagtgagagcctgtctcaaacaaacaaacaatttttaaaggagtacccctaccagatattagaaatttttttaacctatgcaaattaaagcaatatgagattggtacagaaataggaaaggaaagaatggagtccagaggcagatttaaatatatatggggatttttttgtttgtttctttttattttttttttatatggggatttagtatatgctaacgaagaccgttaaaatcagcagggaggccaggcatggtaatccctgcactttgggaggctcggtcgattggattgcttgagcccaggagtttgagacaagcctgggcaacgtggtgagaccctgtctctacaaaaaaatacaaaaactagccaggtgtggtagcatgtgcttgtgctcctagctactcaggaggttgaagtgggaggatggcttgagtctgggaggtggaggctgcagtgagctgagatcgcgccattgccactgtactccagcctgggcgacagaggaagactgtctcaaaaaagaaaaaaagcaaaaagaaagaaaatgaaaagaaaataagaatggataatttagaaaggaattctgagtggtcaatagacatatgaaaatatgtttaacctcattagtaatccagaaaaacgatacaaataaaactaacaatgatattgtttctattgctttttttttgaggcagagtctcactccatcacccagtcggagtgcaatggcgccatctcagctcactgcagcctctgcctcctgggttcaaacaattctcctgcctcagcctcctgagtagctggaattacaggcatatgccaccacacccagctaatttctgtatttttagtaaagcagggtttcgccacattggccaggctggtcttgaactcctgactccagatgatctgcctgcctcagcctcccaaagtgctgggatcacaggagtcagccaccacacctggcctatgtttctattgcttaacagattgataaagaaacaaccctctctgaccttctagtgaaggtataaaattgtataactttcctagagggcaattttgtctcatgaatcaacatttttttgtttgttttttgagactgagtctagctttgtcgcccaggctggagtgcagtggcgcgatcttggctcactgcaacctctgcctcctgggttccagcaattcacccacctcagcctcccgagtagctgggactacaggtgcttgccaccatgtccagctaatttttgaatttttagtagtgacggggtttcaccatgttggccaggttggtctcgaactcttgacctcaggtgatctgcccgccttggcctcccaaagtgctgggattacagacatgagccaccacacccagcctcatgtatcaacattttaaatgagtttacccttcaacccagaaatcccactattacaactattataactctattataactttatcattcagagttaataagacaagtaaacaaaaataataagtgaaagctaaggaaaaaaccctgtgtccctcaatagaggattgctccatattctgtgatatgatgtagtcattttaaaaaaaacacctggcccagcacggtggctcatgcctgtaatcccagtactttgggaggcagaggcaggaggctaacttgagcccaggaattcaagaccagcctgggcaacatagtgaggcctcatttctatgaaaaatttaaaaattagccaagtgtgatggtgcatgcccatagtcgcagtgatttgggagacggaggtgggacaatcacttgaacccaggagcttgaggctaaaggaagctgcagtgagccatgagtgcgccactgtactccatcctgggtgacagaatctcaaaaaaaaaaaaaagaagaagaaaaggtaaataattaatttaaaaaaccatatacctcgatatttgtaccatgatatatttattgttagttaaaaaggttgcagaatcatagtacattatactatgactctgtttttgttttaaaaaaattaaaatttaaaaatccgccaggcatggtggctcatgcttgtaatcccagcagtttgggaggctgaggggggcggatcatgaggtcaggagatcgagaccatcctggccaacatggtgaaaccccatctctactaaaaatacaaaaattagcagcgtgtggtggtgcatgcctgtaatcccagctactcaggaggctgaggcatgagaattgcttgaacccaggaggcagaagtgagccgagatcgtgccactgcactccagcctggtgacagaacgaaactgtgtctcaaaaataaaaataaaaattaaataaataaataaatatccaactatatattacttttgtttgtatcaaaggtaaaaaaggtctggaggaataattccaaactattaactgaatacttctggaagggggtggggaagatgggggaagaaacttaaattttactttgtacatttgtgtactgtcttaaaatgttttacagcaagcatgtattaattttacaatcaaatcaattaaatctgaagattaatgataaattacagaatattcaaataaggaaagactttaaaaggattataaatatcatatatatgtatattctaacttggaaagatttccataaaatactgtctggtgaaaattgggtacacattacaatgtcctcctcatctcttttataacattttccaaagaaacaatgtaatgaccaaaagccccaaaggggcgaaattttataatcaccctaaatacaataaaacacacacaaagatgtgtatgaacattaaagggcatgaactcacctacataaattttgattgtaatttcacaatagtcaggatggaaactaaaactaatctttgagcaccatctcatggagatatttaccactaccatgtggtagttaaaattgtgcccagtgtttctctgtgtgtgtgtgactgaaggcttttctttaacagtatggtgcaatctctaggagatttttttctttttctttaacccattgtgtattacttaacctttctacaaccagcagtgctttctttgtaaaatgtaaaaaccatacttaagaaagaagtggaaattaaagttaaaaaactatatatatacagtttttatacgttcataattttatttatatatatataattttagtttttcagtactgctcccagcatgagaaattcctgaaaatgttttctaatagtgcactggtcaaagtcatgacccatgcaactcccccaccaaatgtttgacattttcctaaagccaaattgaaagctcaaacaacaaaaataataaccaagatggcaggaggagtgtgagcctgggagtactgagtaaacagaaacagtcaaactctccaggcgtggtttgatcttaatagctagtgggctgacctgcaaaccacatcaccacaatccccttaactccctttggagatcatttaggagctctaaccaatacagaatatagctttccaccaggctaatcagatgggagtcctcctttcttttaaattagaacagtgcaacaaccacacaaataaccagacaaaactgcatctaactatagctggatgggactggatggaccagtcccatccagctacctgtttatttggaggttttatctgtacaacaccaaaacagctccataattggtggaattcactcgattgacaaaaataaataggtatgtcaataaaatattaacacaactcattaaaaagtagaaactacaggaggctgaggtgagaggatcgcttgagcccaggaattcgaggctacaatgagctatgatcgtgacactgcactgcagcctgtgtgacagagtggtgagacctcatccctataaaaaaaaagttcacctttttattttgatagagaaggggtctcactatgtaaaagtgaaacattttgatactggtgtcttggcctactctacataataccaaataacttactttgattttcagttcaagagatcattatttttatttatttatttgttttgagacagggtctcactttgtcccccaggctgaagtgcagtagcaccatctcagcttactgcagcctcgacatcctgggctcaagcaatgctcccgcctcagcctcccagtagctgggactgcaggcgcgggccaccacacccagctaattgttgtgtcttttgtagagataaggtttggctatgttgcccaggctggtctcgaactcctggactcaagcagtccattcaagaagcctctcaaagtgctgggattataggcatgagccacggcacctggctaaaacagaacttctcaaagtcccctagccaggaacatcaatatcacctcagaaacacaaattctggggccccacccgagatctattgaatttgagactctgggatttgggccaatctgttttctaacaaatgctctagggtaatggtccccaacctttttggcaccagggaccagtttcctggaagacagtttttccacagacagtgagcaggggatggtttcgggatgatactgttcactccagatcatcaggcattagatctcacaaggagtgccaacctagatccctcgcgtgcacagttcacaataggattcgcactcctatgagattccaatgccaccactgatctgacaggaggcagagctcagacagtaatactggcttgcctgctgctcacctcctgctgggcagcccagttcctaacaggccatggacctccaccagactggtccatggcccaggggttggggacccctgctctaggtaattctgatgtaggctgaagtgggagatccactaatttagataaaattattcaactgatggttgaagctagccatgttgttaatgacaaaaaaaaatatgattgcggcagatcaaaacaaggtgattggcacagaacacaatttttaaaatgtgtttgatttccaaaatttttatgggtatagtcacaaacttatgtcttatttcaaaggtccccagcatttgtatgttgaagagccacttttattgtcctcaagtcttcgaatgtgctaggtataaaaccctagttatatatataaagagagaggctgggcatgatggctcacacctgtaaccccagcactttgagaagccaaggcaagaggagtgcttgagcccaggagtttgagaccagtctgggcaacatggcaagaccctgtctctccaaaatatacaaaaattagttgggtgtggtggcacacacctgtggccccagttacttgagaggtttaggtgggaggatggcttgggccccagaggttgaggctgcagtgagctgagaatgtgcctgtactccagcctgggtgacagattgagaccctgtctcaaaacctcccacctccaagaaaaattattatataaaaaaagagaaagagcaaaggagagtgagaaaaagcattaatatattttacattctccttcctaccaaagaaattggaggaaactcgggacaattgttcctaaatttatgggcaaatgcctaacttagttagggagtctgacatatatgatgccaaaatacctgcataaaaaaagaaaattattacaaataagatatttgctgctttttttttttaagagacagggtctcactgtgtcacccaggatggagtgcaatgttgtgatagaggtgcactgcagcctcaacctccaggcaagctcaagcaatcctcccacctcagcctccagaatatctgggaatacagacacacgccaccatgcccagctaaatttttgtagagatagggtctcactatgttgcccaggctggtcttgaactcctgggctcaagtgatcctcttacctcagcctcccaaagtgttgtgattataggcatgagctacctcactctgcctatataagctttaaaatgttggtatcaaaaacttacattttatctctttaaaaaaaacaattttactatatccccctctgccccttattttacggattattttcaaaagatggcaacattgttttgagtactaggaaattatctcaattataaatgattataatggtgattacatgagtagattatgagaagattatgaagccttactacagactgagaattaagcacaaagtaatcatgactttattagcatccctttctccaggaggcaacccttgcaggaaacatgaattctagaaccatccgtggcaccactagctgtgtgatttggacttctctgagcctcaggattctcatctgtacatttgagagttgggacaaatgattctcaagggcccatccagatctaaaattttgtaattctatgtttccaataacttgaatttttctggctgggcacagtggctgatgcctataatcccagcactttgggaagccgaggcaggtggatcacctgaggttaggagtttgaaaccagcctggccaacatggcgaaaccccatctctactaaaaatacaaagaaaattagccaggcatggtggcaggtgcctgtagtcccatctacttgggaggctgaggcaggagaatggcttaaacctgggaggtggaggttgcaggagccgagatcgtgccactgcactccagcctggatgacagagcaagactccatctcaaaaaagaaaagaaaaaaaaacttgaatttttatatattccaattttataagaaggaaaaattacaaataaacaaaactttcaagaaacaagtatgcatatatataaatatatttatatttttatatttatatatatttatatatatacaaaaatatatataaatatattatatatatatatatattttttttttggatacagaatttcatgctcttgcccaggctggagtcaagtggcatgatctcagttcactgcagcctccatcccctgggttcaagcgattcttgtgcctcagcctccccagtagctgggattatagacatgtgccaccacactcagctaatttttgtatttttagtagaactgaggtttcaccatgttggccaggctggtcttgaactcccaacctcaagtgatctgcccgtctcggcctcccaaagtgctgggattacaggtgtgaaccactgcatccagtctacaattatatattgttcacttagctcaatcttatctgtagctgcagtgccatacaatgattatgagttcagaattctgttgtgagggccctgtaacagactgaataaaaaatttattatggttatggtaattctattgtgtattttagaataaatacctaaatatttagataatatttaattatctaaatatttgttaaccatatatagtatataacaacttccattaaccaacacatggaattaattgaaatatctcatttcttgctcattctgaataagtgggagttcgataatctatctctcttctgaggaattcaacaagtttttatttttggtatttcattagcattactcaatcttcgaatgagaataatagagattattgtctctaggctatcaatggggatgcagaatcagaacaatttgaagttggaaggaactttaaaagttgactaatcagaccctttaatttacagatgagaagagtgagaccaagcccagtgcagtggctcatgcctgtaatcccaatacattgggaggctgaagcaggaggatcccttgagctcaggagttaaggctgcagtgagctataatcatatcactgtactccagcctgggtgacagaacaagaaccctctcaaattaaaaaaaaaaaaaaaagaaagaaagaaagaaagaaaagtgagacccggagaaggtaaaggccagaaatatggagatcatctggataagagtaggaataaaatactaggctccctgatcccccagcttactttccaacattatgagaagattatgaggccttactacagactaaggattgaaaacaaagtaattgtgatcttattgacatctctttctcaggaggcaatcctttcaggaaacataaattctagaatcagctagaagccctcaatagatttccgtcatggtgcccaaaatgtaggataagctagatagagaaattcaagtgtttttaggattttcctatgttatagggttcttgcctttccccacccctacgcctaaattcaactctactataaaatctaaaggcaattctctaaaggaaagagttcttaaatgaagagagatataagatccctccctaactttgacagtttacattttaaccattaatattccatcaataaccaggataacatcattataatggtcagggaatttacttagaaactaatattagaaaattaaacagtcttggccgggtgtggtggctcacacctgtaatcccggcactttgggaggctgagatcggtgggtcacttgcgtccaggagttcaagaccagcctgggcaacatggtgaaaccctgtctctacataaaatataaaaaattagccaggtgtggtggtgcatacttgtggtcccaactactcaggaggttgaggtggtgggaggatcacttgagcccaggaggcaagggttgcagtgagccaagatcatgccagtgcactgtagcctgggtgacagagtgagaccctgtctgaaagaaagaaggaaaggaaggaaggaaggaaagaaggaaggaaggaagggagggaaggagggaaggaggggaaaagagggagagaggaaggaaggaaagaaggaaggaagggagtgagtgagtgagttaaacagccctaaatataatcagtagagcaaggaaaaaaggaatggacatgtgtgtgtgtgtgtgtgtgtgtgtgtgtgtgtgtgtgtgtgtgtgtgtgcgcgcgcacgctaagagaggggaatgacagagaactccagactggtactaatctattaagaataaatgttattattgtgggtggaagaaacaggttatggaggaaaagccaggaagagcactgttgccaagaaccgttatcaattaacattctgaaaccatagccttactcctcttccttaggaatcctataacatgagaacataaagattcactaagccaacaaggctttggttgcacactgggatcaagaagctcactaaaggatccagatgtctgcttcattggagtggaaaaaaatgtcatagtgagttccacgaaatatctggcaggaacagaccatgcagaagccaactacactgactgagagtgagcataagcgagagcaagagcgagaaagagagggagagaggaagagagagaagatttaattcaagaggcgttgctggccgggcatagtggctcacatctctgtaatcccagcactttgggaggccgaggcaggcagatcacttgaggccaggagtttgagaccagcctggccaacatagtgaaaccccatctctactaaaaacacaaaagttagccgggtatggcagtgcatgcctgtaatcccagttactcaggaggctgaggcatgagaatcgcttgaacctgggagccagaggttgcagtgagccaagatcaggcaactgcactccagcctgggcaacagtgtgagactctgtatccaaaaaaaaaaaaaaaaaggaggtatcactgagctgtgaaaagaaactggccagccaaatcataggctcccctctcagtctgatgttgtatcaatcctggatttgcttgtcctctgagaaggaagtccctacctttggagaaagaagctattgaacatctctctgttctcttttgctagatccaccagttcctgtgcagctctaggaaggcaagaacatttttggctgacttctttgtagtctaaagaatgcataggtcagctcttgtaaccccaaaataccactgagatttgggcagtggcatatcaaggagttgggcctaaaagctaagcaaagattgagaacaaaaaaataggagtaagttaaaagcagggtcctcttccagggaatatatgaaagctgatggtctagaacggggatcagcacacatttgccataaagggccagatagtaaatattttagactttcaagctgcacatccttatcacagctactcagttctgctactgtaaagcaaaagcagtcatagatgataaacaaataaatgagtgtgcccgtgttccaataaaactttacttataaacaatgaaacttgaatttcatataatttttacatgtcagaggacatcattctttttaaaaattattttcaaccacttaaaaaatgaaaaccattcttagctcatgggctgcacaaaaacaggtggtaggccagatttggcccacaggctgtagtttgcagacccatggtctagaacaacgctgtccaatagaaatatgagagctgttgggtacagtggttcacacctgtaatcccagcattttgggaggccaaagtgagatgattccctgagccctggagtttaagaccagcctgggtaacatggcaagagatcatctctacaaaaaaaaattaaaaatcagctgggcatggtggtgtgcacctgtagtcctagctactggggagaatgaggctggaagaggattgcttgagctcaggagttcaagcatgtagtgagctattacatccactattacactccagcctgggtaacagagtgagactctgtctcttagaaaagaaagccgggcacagtggctcatgcctgtaatcccagcactttgggaggctgaggcaggcagatcatgaggtcaggagatcgagaccatcctggctaacatggtgaaaccccatctctactaaaaatacaaaaaaattaggcgggcgtggtggtgggcacctgtagtcccagctactcgggaggctgaggcaggagaatggtgtgaaatataagagctgaaggcaggcacagtggaacatgcctgcagtccgagttacttgcgaggctgaggtgggaggatttgcttcagcctgggagttagatgtagcctaggcaacatagtgagacccatctctaaaaaaataaaaagaaaaaaagaaagaaagaaaaaagaaaaaaatataatgagagccatatatgtaatttaaaattttctagtaatctcatgtaaaaacttttaaaagggtaaaattaatattttatttaacccagtatatgaaaaatatgattttaatgctatcaatatgtaaattaccagtgagatattttactttctctgttttcatattaagcctttgaaatccaggatgtatcttacacttatagcccatctcggttcattctaaatatattataagaattcaatagttacagactgctaaagatcagtaaagatgttgtccattttcccagctgcaccatctgagagtgttgcatgttgaagacatgatctgttacaacaaataagtcaagtcacctgtactggaaatcagtttgctgaaattattgaatcaagttgaagaaaaggaggttccagccttgacaagaggattgtggccctttttggaatccctctggacacagcctcccagcatcttctaggaaagatgaggcagctcaaagggaagcccaggaaggagacatggaaggacaagaaggagcagaagcaagccatgcaggaggcccggcagcagatcaccacggtggtgctgcccacgctggccgcggtcgtgctgctgattgtggtgtttgtgtatgcagccacacgccccaccatcaccaagtgagcaccgcggccatccacggacccagtcggcagggaaaggaggcacaggaggtagaagcaaatgaaaaatggctttcatattcagagatgttcatgctgctgagctataagcaggagcaccctgtcttcgctgcttttttttttttcttttttgagacagagtctcgctcagtcacccagactggaacgcaatggtgcagtctcagctcactgcaacctctgcctcctgggttcaagcgattctcctgcctcaacctcacgagtagctgggattacaggcacatgccaccacgcccagctaattttcgtatttttagtagagacagggtttcaccatatgagtcaggctggtctcgaactcctgacctcgggattcacccgccttggcctcccaaagtgctgggatacaggcgtgagccactgcaccaggcccttctctggcctttgacttgattaaagtgtctctgcttttcttgggagggagtaggggatgttttatcagtgaacgtgccatataccttacggtccactcatatgcctttcagacttcaaagcagtgtgtgtgtgtgtgtgtgtgtgtgtgtctgtctttttctcgcctaaaaatcgataagtagctccacctgaagaggggcagaacttctgggtcaggaagcagctggaatccacactcacctcatccccattatttggatcatgcctctttccaacacgtgttcacaatctccaaagggaatgtatttcctctctgtgcttaatgtaatttgaaatatgttgaatcaaagtgaaatatttatttttgaataaaggagataatagcattaaaaaattcaatagttagaagctaccatattgaacagtgcagagctcttaggttggtgcaaaagtaattgcggtttttgccattacttttaatagaacaatgttttcaaacttaagtttgcatcagaatcacttgattctgattttaacagtcgttaaaataaagattgctgggacccatccgcagtttctggttttggcagggtgcaagaacttccatttctaataagttcctgggtggtgatgatgctgttggttgaaggaccacactttgagaaccacttatctagaagctggagcagtaagaaaaagtagaaaagcaattaggagccagggatatgtaaaagaaagtggtttaaaaaaaaaaaaaaagtccgggcgcagtggctcacgcctgtaatcccagcactttgggaggccaaggcaggtggatcatttaaggtcaggagtttgagaccagcctagccaacatggtgaaaaccccatctctactaaaaatacaaaaattagatgggtgtggtggtacatgcctgtaatcccagctactcgggaggctgaagcaggagaattgcttgaacctgggagaagtaggctgcagtgagctgagatcgtgccacggcactccagcctgggtgacagagtgagactccctctcaaaaaaaaaaaaaaaaaaaaaaaaaaagaactaggccaagcaagatggctcattcatgcctgtaatcccagtaccttgggaggccaaggtggaaggatcacttgagcccaggagtttgagaccaaactgggcaacacagggaaactccctctctacaaaaaaaaaaaaaaaaaaaacctaaaaatcaacaaagcatgataatgactagtcccagttacttcaaaggttgaggtgagagaatcgcttgatcccaggaggtcgaggctccagtgagctgtgatcacaccactgcactccagcctaggtgacagagcaagaccctgtaaaaaaaaaaaagcactaaacaatgagataccactacacatctattacaatggctaggccaggcatggtagctcacgcctataatcccagaactttgggaggccgaggtgagcagatcatctgaggtcaggagtttgaaaataccctgtccaacatggtgaaactccatctgtactaaaaatacaaaaaaaaaaattagttgggcgtggtaacatgcgcctgtaatcccagctacttgggaggatgaggcaggagaatcgcttgaacccaggaggcggaggttgcagtgagctgagatcgtgccactgcactccagcctgggcgacagagagagactccacctcaaaaaaaaaaaaaaagaaaaagaatggctaaaatccaaaatactgacaattccaaatactggcaaggatgtggaacaacaggaactctcattcattgctggtaggaatgcaaaatagtatagacactttggaagataatttggcagtttcttacaaaactaaatatacccttaccatatgatccagcaattgtgctcttgggtattacccaaatgagttgtaaactatgtccacacaaaaacttgcacactggtgtttatagcagttttagtcataattgccaaaactgaaagatgtccttcagtaggtgaatagataaactgtggtacatccaatgaaatattattcagtgctaaaaagaaatgagctatcaagccatgaaaatacatagaggaaccctaaatgcatattactaagtaaaagaagccaatctgaaaagtctacacatggtatgattccaattctatgacattctgtaaaaggcaaaactatggagatagaaaaaaaaaaatcagtggttgccaggggttgaggggggggagaaatgaagaggcggagcatagaggatttttagggtagtgaaactattctgtatgataccaaaatggtggatacatgtcactatatactgttctagacccatagaaagtacaccaccaagagtggatcctaaagtaaactatggactttgattgataatgatatgtcaatgtaggttcattgatgataacatatgtaccattctagtgcaggatgctgatattgggggaggctgcatctgtgaaggggcagcaaatctgtatatgagaactctttgtacttccctctcaattttgccatgaacctgaaactgctctaaaaaataaagtcttttttgggctgggcacagtggctcacacctgtaatcccagaactttgggaggccgaggcaggcggatcacctgaggtcggaagttcaagaccagcttgaccaacatggagaaaccccatctcgactaaaaatacaaaattagctgagtgtggtggtgcatacctgtaatcccagctactcggaaggctgaggcaggagaattgcttgaacccgggaggcagaggttgcggtgggctaagattgcgccactgcactccagcctgggtgacagagagagactccatctcaaaaaaagaaaagaaaagaaaacaacattaattctcacttttgaagggatagcaggaagatgcatattaatattacagcatctttgataaaaaccaatctatttggccgggcatggtggctcatgcctgttaccctagcactttgggaggctgaagaaggaagatcccttgagtccaggagtccgagaccagcctaggaatacagtaagaccttgtctctacaataaatacacaaaattagtgagcatagtggcaggcacctatagttgcagctactctagaggctgaagtgggaggatcccttgagtgctggaggtcaaggctgcagtgagccaaaaaaaagaccaatgaattcaagtgtctaccccctaacccaaacagaagcagaccctaaatctttcagggtgtcatcctaagctaagtagaaatctaaaagtttcctagagcacagataagagtgacctagcactccagccaaccagaaagggaaaagcagaacataagcttactttctacaaaggaagcagctatacaaattatgccagagaactagaaaaacactaatttgagtatccaaaaggggggaagtagttccaaatatttctaataaagagcattctgtaagccttccaacaagctattaaaggttgagaaaacctatctggcaacccagttaatttcaggacacataattacaggaacttagtccctcaagtcagagatgcctgtgaggaattgcacggtttgaatcacagcagatttgcagcctatttaagtttttggaccactagaaaactggaaaaacaattcatttaatatagttgagagaatacttaaaaatcctacatcaattcaattatatactgacttagaattatatgattacttcctatggagggttaattccctggcatttaggttgagcccctacatataccttcaattatcaaaaaaaaaatcaaaactttatttgaactcaaagttttacttatgagaataatgaaatcttacttagattaacactcaaaacatttcttggggataggctttttaaaatgaaacccataatttatttttgttacaaaaggaaatgtttacgtccctgttaaagtataaaaagggtctcattagtgtatctgaagagtactacattgtacattgtcttccagaggtggaaaaaaaaagaagttaacttttacatatacttgaaagggaaagtctgcattctgcactaagttttcttgaatggaataagtttaaattgtcctcagttctagcaaagaatgttcttaaatatctgtctttaaaaatccaatagtagggccgggtgaggtggctcacgtctgtaatcccagcattttgggaggcagatggatcatctgaggtcaggagttcgaaaacagcccggccaacatggtgaaaacagcatggccaacatggtgaaaccctgtctccgtaaaaatacaaaaattagctgggcgtggtggcgggtgcctgtaatcccagctacttgggaggctgaggtaggagaatcacttgaacctgggaggtggaggttgctgcgagccgagattgcaccattgcactccagcctgggcaacaagagcaaaactctgtttcaagagaaaaaaaaaatccaatagtaatttcagattcacttaaatatccccaaaatagtaagtggaaaaaaaagttttttacttgggaagccgaggcaggcggatcacaaggtcaggagttcaagaccagcctggccaacatggtgaaaccccgtctctactaaaaatagaaaaattagctgggcctggtggtgtgtgcctgtaatcccagctactcagaagcctgaggcacgagaattgcttgaatctgggagacggaagttgcagtgagctgagatcgtaccattgcactccagcctgggcaacagagtgagactccaaaaaaaaaaaaagaaaagaaaagaaaaagaaaaagttttttttacttgagggcagcatcattctgaattggatcaaagttactgaaatgtaattaatcttattgtataaacatgtctttcgtcattgtccctgtatagaaacaataaatggagaaagagggtcaatagtctctccctccacaaaattttaagttcagatcaaggcagagaagacataaaacaattatttgagtattcctaactctttctcactttaatctgaggtttgtatatatgtctgagtaagactgggaaactaaccccacccaaccctcaacacacacgttgaaaatgagatcttccaaaagagaatgaaagaactgaaagaactaactacatattatatacttactctgttcataaccaaaatgttttctttgttaatgtattcactcgaattcaatagagtgttaaatttgccagtaatttttatttctacgacaaaccatattaatacacgacaagacagtatgacttcaaaaaatgagccaagaacttaaataggtatttctccaaagaagatataccaataagcacatgaaaagatggtcaacatcattagtcactagggaaatgtaagtcaaaaccacaatgagataccaattcacatcctctaggatagccatcttttttaaaaaaaaattttttttgagagatggggtctctcatctctcatgcacgccagcatggagtgcagtgtcatgatcacagcgcactgcagcctcaaactcctgggcttaagggatcctcccactacaggctccggactagctgggactacaggagcatgccactgtatccaactggctttttaaaaaaaaaaaagaagaagaaaaagaagaagaagaaagaaaacaaaacaaaaaggctgagtgcaatgtctcacacctgtaattccagcactttgggaggattgcttgaggccagaagttcaagaccagcctgggcaacacagaaagaccctgtttttacaaaaaaaaaaaaaaaaatatatatatatatatatatatatgtatgtatatatatacatatatatatatttttttttttttttaaagaaagaaaaagagactgggtgtggtgcctgtaatcccagcactttgggaggctgagtggggaggatcacttgaagccaggagtttgagtattcagtaagctatgatcatgccactgtggtctaccagtctacgctgggcagcagagcaagatcccatctctctctctcaatctctgtgtgtgtgtgtatacatatatatatatatacacacacatacagtaatacatatatatagtaatttcagattaccatagattactatatatagatctatacagggatatatagatatatatagatctatagatatatctccctgtctatatatagagatagatatatatagatagatatacagagatagatctctctatatctatttatatctatctatatgtatatctatagagagagaaattttaaaaagaaaaaataggctgggtgcagtggctcacgcctgtaatcctagcactttgggaggccgaggcaggcggattgcctgagctcaggagttcgagaccagcctgggtaacatggaaaaaccctgtctctactaaaaatacaaaaatttagccaggcgtggttgtgcgtgcctgtaatcccagctactcgggaggctgaggcatgaaaatcccttgaacctgggaggcagaggttacaatgaaccaagatcgtgccactctactccaggctgggtgacagagggagactctgtctcaaaaaaaaaaaaagaaagaaagaaagaaaaagaaaaagaaaataacaagtgttggtgaggatgtggagaaatgggaactctcatgcattgttggtgagaatgtaaaatggtgcagccacagtgtaaaacattttggaattactcaagacatcgaatacaattaccatatgtcccaacaataccactcttaggtatatacccaaaataattggaaaaaaaattaatcaaatacttgtacaccaatgtttctagcagtactacgcacaatagtgaaaagttgagagccaagcgcggtgactcatgcctgtaatcactttgagaggtcaaggcaggcagatcacttgaggtcaagaggtcgagaacaccctggccaacatggtgagatcccatttctattaaaaatacaaaaattaggcggggcacggtggctcaaacctgtaatcccagcactgtgggaggctgaggcaggcggatcaccagaggtcaggagttcgaggccagcctgtccaacatggcaaaaccctgtctctactaaaaatacaaaaatcagccaggcatggtgattcatgcctgtaatcccagctactcaggaggctgagacaggagaatcacttgaacccaggaggcagaggttgcagtgagctgagatcatgccactgcactccaacctgggtgacagagcaagactctgtctcaaaaaaaaaaaaaaattagccaggtttggtggcacatgcctgtaatcccagctcctggggaagctgaggcaggagaatcatctgaacgattcctccgataagggggaggttgcagtgagccaagattgcgcctgcactccagcctgcagcacagagcaagactctgactcaaaaaaaaaaaaaaaaggtggaaaccacccatgtgtccataaacagatgaatgcttgaacaaaatgtggtatatccatacaatggaaccttagtcagccataaaaaggaatgacattcaggtatatgctataacatgaaggaaccttgatgacaaggtttattttaccttagtaaaataagccaggcacaaaaggataaatattgtatgattccacttatatatggtacctagagtagtcaaattcatagagatagaaagtagaatggtggttgccagaactgggagaagggggcatggggaataattatttatgggatgctgcagagtttctgtttgtgattaatgaagttctgaaactgtagagcggtcatggttacacaacattatgaatgtgcttaatgccacttaaccaaacacttaaaaacgacaaatcttatgtatattttactataaaaatacataaggggattcatagcttttcaaaatgcttctagggagtataggagagggggaaaaagccagtagtcctcaatgcaatgagccctacaccagcaactttaaggctgaggcagagaaatgtaactgttagagccacaccacctggtcagctttttttaagtgtgtgtgcgtgtgtgtgtgtttgtgtgtgtgtgtgtgtgtgtgcatgcacattttgtttttcctttttgtggagcactatattccccaggcaaatctcaaactcctgggctcaatctatcctcctgcctttgcttccctaaatgctgggattacaggtgtgagtccagcagctttttttcttttctttcttcctttttttttttttttttttttgaaacagggtcttgctctgttgcccaggctggagtgtgatggagtgattatggctcactgcatcctccaactctccagctcaggcgatcctcccatctcagcctcccaagtgcaggtacctgggactacaggcacacaccaccacacccaactaattgttaatttttttgtagagacgaagtctccttatgttgccctggctgggcaactcctgggctcaagcaatcctcctgcctcggcctcccaaagtgctgggattacaggcacaagccactgcgcccagccttggtgagctttctgaactcaaagctgagtagagacctgaagtaactatcaggacaatatgggtcaataaaactcatcctcctacttccattcgtgtctgagttaaaacagtatcttccacttaagtgctcatttctcaagttttgattttaaatataaaaacagcctaaaggtgcttactgtgtttacttcttttatatttcaactatctgattttttagcagtgtctagggacaaaaactagcatttctctgagaccatcacatccccaatctgactgctatgtgaatggtttgttgggtgcctggaatggcttgtttatgtaagctctcacctgtaatcccacactttgggaggccgaggcggaggatcacttcaggccaagagttcagttcaagaccagcctgagcaacataaggagatccaaccccctacccccatccccacctccaaccccagctctacaaaaaaattaaaaaattagctagggccaggcgccgtggctcacgcctgtaatcccagaattttgggaggccgaggcgggcggatcacgaggtcaagagatcgagaccatcctggacaacatggtgaaattcccgtctctactaaaaatacaaaaattagcggggcgtggtggcgtgggcctgtagtcctagctactcgggaggctgaggcgggagaatcgcttgaacccgggaggcggaggttgcagtgagcctttgcgccaccgcactctagcctggcgacagtgagactccatctcaccaaaaaaaaaaaaaaaaaaaaaattagctgggagtggtggcacgcgcctgtagccccaactactcgggaggctgaggcgggaggatcgctcgagaccaggagtttgagaccagcctgggcaacataaggagacccaacccccccgcccttcagctttacaaaaaaattaaaaaattagccaggagtggtggcgccgcgtgcctgcagccccagctactcgggaggctgaggcgggagggtcgcttgaacccgggagttcaaggctgcaacgagctatgatagcgccactgcactccagcctgggcgacagagcaagaccctgttttacacagacaaacaaaaacgaacaaaaaggtcacagcgaactttgttcaaaagtcacattaacacttaaatgccttaacccggactgaaagcccgggcttaggacacagggcagctctccctcaaaaaggggtctcccagcaacacccaatccacaagttgctcctcgccctccccaaaccggtacaagatatatcagtctctgggcagctccaacggattctgaagctacgggagggactaaggaacaaatatgaaatgtcggacaaatgaaatgtgcgcaacagctaggttttggaggataagccagttgctgagcgacttctcaaatcttccaagtgcctccaacacctctcccacccggtagggctgcgctctttagctctttcaaccttccacgaccggcctctccgctgccctatcagcaaatcatcgggccggtgcctgccagtccgggccaatcccgaacacatttactttgagcgggaaaagctcagaagcggcgagagagcgtggtccgctaaccgccccttcctctccttgtctctggggggtaacggagcctggagtggtcgcccattggatgggcatcggaccaatggcgggctgcgaaacgggaggggcgggcctcacagcggggcggggcgcgcctgtgccgtgtcgcgtgccgagccgcgagccccaggcaggccaggtaacggcctctgcccccgcccctccctccccgctcggacttcccttacccgcacactggctccaggcagcgcccgggcggcggaggcggctgcggagacggcggggtgcgggctgagggagccgggcctggacgccccccccatcacccccgtaccccaggagctgtgcctagtccaggagaggctggggggcgccccatggaggtgagacgcggagacacctgcccgcgccctcacccctcaggcctgagggaggaaggacttgaggtaatggatgaggaagggcagggtccagggggcggccagacttgcaagaggcgacgaggaggagaggctgaggagggggcgcgtccctagacggggcggcagaggcgggtcgtcggtggggaggccgaacggggcgggcgggcggggggcgcggcgcgggctgactggacgggccggacggagcgcgggtcgccgcgattcccgggaggcagccgtcgcgctgaggcggtggccggggaggggcgcccctcggggtcagcactcagggggcccgaggggagagtgagaatcccgaggctggaagcgcgggcccccacattcgtgtcctctgagagggttcggaattgagccgaacagccgaggtagaacaggtgtcgggccgtttcagctccggcgtcaccctcgtgaccactttctgatatttcctattcccgtgtgctgcagcccaaagtcgcgttccccggaggtgcgaatcgctgttggaacctcggcgccgacgccggcagcaggttaaccgacgtcttcggcagcgtgatgttgactggctccgcttccttctacgattgctacacatcgcaggtcctttagtaaactctgcctctgttagacgatttattctcaaatggatttactcgagccaccgattcataggtgtttaatggctccacagttaaggaagagaaaaccagggaaaactttttttttttttttttttttttgagacagagtcttgctctgtctcctaggctggagtgcagtggcgccatctcggctcactgcaacctccgccagccgggctcaggcgattcttgtgcctcagcttcctgaggcacgcgccaccacgcccggctgttttttttgtttgttttgtttttgttttttgtttttgagatggagttttgctcttgttgcccaggctggagtgcagtggtgcgatctcggctcacctcaacctctgcctccggggctcaagttattctcctgcctcagcctccggagtagctgggattacaggcatgcgccaccacgcctggctaattttgtatttttagtagagacagggtttctccatgttggtcaggctggtctcgaactcccaacctcgggtgatccgcgcacctcggcctcccaaagtgctgggattacaggcatgagccaccgcgtccagccgttttgttttgttttttgagacggagtctccttctgttgcccaggctggagtgcagtggtgcgatctcggatcactgcaacctctgtctccctggttcaagcagttcttccgtctcagcctccccagtagctgggattacaggcacctgccatcatgcccggctaatttttgtattgtttttagagaccgggtttcaccatgttccccaggctggtctcgaacttctgggctccagccatcctcccgcctcggcctcccaaagtgctaggatttcaggccacagcgcccagcccaggaacaattttttttttttttttttgagacggagtcttgctctgtcgcccaggctggagtgcagtgacgcaatctccgctcactgcaagctccacctcccaggttcacgccattctcctgcctcagcctcccgagtagctgggactacaggcacccgccaccacgcccggctaatttttttgtatttttagtagatacggggtttcactgtgttagccagtatggtctcgatctcctgacctcgtgatccgctcgcctcagcctcccaaagtgctgggattacaggcgtgagccaccgcgcccggctacaatcttttaaatacagtgtttgcagaatacatactttgctttgaaaataagttaagggccgggcgccatggctcgtgcctgtaatcccagcactctggggggctgaggcgggtggatcacctgagttcgggagttcaagaccagcctggccaacatggcgaaaccccatctctactaaaaatacaaaaatcagccgggtgtgggggcaggcacctgtaatcccagctacttgggagactgaggcaggagaatcttaaaccagggaggtggaggttgcagtgagccaagatcatgccactgcactccagcctgggtgacagagtgagactccctctcaaaaaaaaaaaaaaaagaaaaaagaaaacaaattgaagaataagatttttcattgattcgtttccatcttgtccttagcataacataattccagaaatgtaagaaaatccattatttagtaagattaaaatatgttttttttcgttcaggcatttattgcaagttggtacaaacatatttttgataatttaaaggtgaaaatttcactttactcctttattttctggttttaacaatgtcttaaattatatgctaccacttacctcaccaagacatttagatttattaatcaaaggaaataaagcttgggtaatgtaagtaattttcatttgaaattatttaaccaggacatcaatgttgatattgttgtactttgaattataacaatatctagaaataaattattttatttaatccacactaagaatcttgtatattattatgccactgtacagattgagaaactgagcctcagagagcttgatttgtgccctaaatgacaaagctcaagtggaacccagaccatagttccactgctctctgcagtgtttacatccggactaaaatttatttggatttaatttcagttcactgttttaagtatgttaaggatataagtgatacattttaaagttaatccagttaatatgcccactcaaatatttgcatatttcctggcctctgttaacgaaagggatgcagatatttcaagtatgattgtttgaatccaccacattactttagttgttttaacccaagaatacaaaagttaagtcagtcctttaaaaggattttatttgtaatattcaaaatgtattttaaaatgtaaaatgtacttgaaagaatactcccaaaatattttcaatttccaatactgtttattcatttgacattacataatctgaaaatgttccttttgtttaagcaactatttcaaaaagatgaacaattatttatgtcactttggatacttcacacataagagtgggcctatgatgataactttagaactcaaaggataaaattaggaaagaaagataaaaagcctttgtaaaagttgctgctaaccaacaaattctggaaaggtagtttttagttttagctctcagcaaaatcccttctgtgtttccatttcctcaacttgagaatagtcataatataaactataaacagaaaaattataatgtgtgggttttaaatagaatcataaccagaacttaaacaaatggttgtaaaatattttgagattcttgaagatggatgattggaaggtatttcttaatgttcacattttgttggtatcatataacgttgtatagtttaaatgtttttcagtgatcatatctattaggaacaaaaatttagaaatattaacagaataaaagcaattagaaaatacttttagccagaattatatcttttccttttttattttattttattttatttatttatttatttattttgagatggagtctccctctgttgcccaggctggagtgcaatagctcaatcttggctcactgcaacctccgccttctgggttcaagtgactctcctgcctcagcctcttgagtagctgggattgcaggcacctgccaccacacctggctaatttttgtatttttgtcgaaacgggctttcgccatgttgatcaggagttaaactcctgacctcaggtgatccgcccacctaggcctcccaaaagtgctgggattacaggtgtgagccactgcgcccggccagaattacatctcttctgtatttataagaaaatactattttcattgtgtttatgtctgggtatttatagttattgcatctcaggttttaatagttacttatctggagagttaaaaattttgaatttatactttcagtcttctttaaggaagcattttctagaataaacaatgtataaattagcttaatctttttttgtttgttaaattcactttccctacatggtcccttttggaaggaggcagggtttaaatcattaaaatcttaaaacccaaggcccggcaaagtgactcacacctgtaatcccagcactttgggaggccaaggcaggaggatcgcttgaggccaggagtttaagaccagcctgggcaacacagtgagaccccatttctatttaaaaaaaaaaaaagaaacttaacacccaaagtttttgtttactcaggttcattacagaagcattcaccgaggctgggtgcaatggctcacgcctgtaatcccaacactttggaaggcccaaggcgggcagatcacttgaggtcaggatttgagaccagcctgaccaacatggtgaaaccctaaaactctctactgaaaatacaaaaattagccaggcatggtggcaggtgcctgtaatcccagttacttgggaggctaaggcaggagaatcgcttcaacccgggaggcagaggttgcagtgagccgagatctcgccactctactccagtctgggcaacagagccagactcttgtctcaaaaaaaaaaaaaaaaaaaaaaaaagatactgtataaaatgtcctcaaataggaggaaaaagaccttcagttttggttttagatttgttacatattggctgagtgacttgcagcctcagtttccttgtttttaaagtagagataatactcatgtcacaaggtttactggatatgataatatatgtgaaatttatttgaatagtgtaaaattccatataaatatacattaacttttttcagagattggggacattaagactgaaatttatttatttatttttgagacagagtctcgctctgtcgcccaggatggagtacagtggtgctatcttggctcactgcaagctccgcctcccgggttcatgccattctcctgcctcagcctcccaagtagctgggactacaggcgcccatcaccaccacagctggctaattttttgtatttttagtagagacagggtttagccaggatggtctcatctcctgacctcgtgatccgcccacctcggcctcccaaagtgctgggattacaggcttgagccaccgcgcctggccccaagactgaattttatatataatgtattaaaaataacattgctagtatccacataatgcttatctattcaaaaaattacaaaaaaactacaataattataggtattttataccacagaccagcaacaaggagccagagctgcccgatacctgttttgtaaataaagttttattgcaatgcagccaaacccatttgtttattgtctatggttgatttagtgctgcagcattagagttgaagagttttgacagcaaccttaatggccagctaagcctaaaatatttactatttggccttttgcagaacaagtttgccaatccctggtataaagcaagcttaagtcactaagtctgcatttgaatgtaattctcccaactcttacatctgtgttatttccgctttcttatttttctcatattctacaacaaatgaagttttgatgtgtctgataaacatttcttaaaactttcagagtgaagacaatgtagacctaaggcagacctatactccattttcttcaacagaatattcaagttctgtagattcttcacttttctgtgcaccatggtctacttatggagatgacattaaacaaccttctaattctcagatcagtataaagaacaggtaaattaattcatttctcaaggtaattgaggtatttttaaatttaattacataggaactgaggttatttgctctctgttccctacattatcattttactattgtggcattttgtgtttttcaaacttttaggaaagtgtaaactgggcagttatttgtgtatagtttttacggtgttttgctttgttttgttttgttgagacagggtctcgctctgtcacccagtctggagtgcagtggcgagatcatggctcactacaactttgaactcctgggctcaagccatactcctgcctcagcctccacagtagctgggactacaggtatgcaccacggtggtcagctaactttaaaaaaatttgttgccttttctttttaagaaacgaggtctcactttgttgcctaggctggtcttgaactcctggcctcaaaccatcctcccaccttggcctcccaaagtgctggaattacagacatgagcctctgcccagctaggttattacttaaaaaaattcattagtgggaacatttagtgcataaatcttaagttcttctttctaaagatgacttatatgaatgagttaaaacttttagatgtttttgtcatccagttctaaattttccatttttttccttcacaactctacaacaaacagggttttatcaaacataagatattttaaattatttttctgttcaattccacaaataataagggccccctgtacatcagatgcttttctatgggggataccagaatttaaacatggcaaatattatccttgcctttataatcttgatgatgatgatgatgatgatgatgatgatgatgatgacgataactaggatattatgggagcctattgcaaagaggagccctaagggagtgacatctatctttaattatatatgggagctatttatagaggctgatgcctcattagtctaaccaggaaatagttatttgtatttattagaaaagtgttaaaaaattaaaattcttggcaaattctctaaaataattttattagaaagtctacgtaatacataattctacaaaaaacaaaaatatttttaaagttgatacatgctattgaaaaaattcaagcctattctcgcttttggctaagatcaagtgaaaaaattcaaacttttcagaaatatatatcaagaaaagtgaaagtctgtcttaaccttctccccccgccacccaataacagctgctagcagtttggtatatattacattgaattttttttagatatatactaatacataattacacaaaaaagcttttatattgaacttttatgagataacacatgtagtagaaaaggtattggacttacagggagactatttagcaagtatgtagtagtttggcaagtcatatacccttgcaaaatacaagtttcttaatatctcaaatgatcattcatttattcaacagataataacgaatgattactaatgcttacctttccaatgttatgaagatcaattaaatatgagtgttatgcaaatataaggtattttatttcaaaaatatcccaacactatgaaatgttgaaatatgaaaaaaccggaagttacaatttattataaaacaatgtacagggccgggattggtggctcacgcctgtaatcccagcactttgggaagctgaggtgggcagatcacaaggtcaggagttcgagaccagcctgaccaacatggtcaggctgaaaatacaaaaaaaaattagccaggcgtggtggcacgcgcctgtagtcccagctacttgggaggctgaggcaggagaaccgcttgaacctgggaggcgaaggttgcagtgagcagagatcgcgccattgcactgcagcctggggaacagagcgagactccatctcaaaaataaataaataaataaataaacaaacaaaccaacaaatagatgtacaggttgagcatcccaatctgaaaatccgaaatccagactgatccaaaatccaaaactttttgagtgctgacatgatgctcaaaacaaatgctcattggagcatttcagattttggattagggacgttcaaccaaatatacaagtatacattatatatttggagtataatgtatatttccagaatccaagaaaaaaacctgaaatccaaaacacctctgatcccaagcattttggataaggaatactcaacctgtattacttcaaggaagaaattacccaaaaactgtaacaggtaaaaggtaccaatcttccacgtgcttgtggtttttacattttgtatttagtcagtatcagtcactaggtggatttctgggataaaaggaactccatccagtcatgctttgcaagcattagggatggctcccaaatctgttacatttaagcgacaactgcaaaattgctgtggtgtctaggatgaccatatcgcatttcacttttttatccaatattaatatagagtcacaaaaatagaatagagcatcaggttcatatggttttcaaattgcaaatgaggaagctgagcaggtgttgatggaataatgtataataagacaagacttgctttcaggagcagctatgataccaagcatgtctgtgacatcatagatgacagatttatatcttggtcacctaaaatgaaaaccatgtgttgtggagaaataagaggtaagcatgcactgtaagttagatataggatttgaaatgaaggagaaatatttatgtggaaaagacatttccacataaaaatatttatgtagaaaagaaaatattcttgagttctagtctcttctttatttgaaatgatggtgtagattcagtccacatattttatagataaagatggtaaggtaggataagtctggaaagagtaatcaatatattgtatttcagcacgaattcatttatttttaggattcaaacagaaagaaatgactatggcagtgaaacagacttatatggacttgtgtctaacattttggaagaacaagataagtcacagccatattttgctgaagggttagtatataatctatatagtatataacaggcttttaaactaacatacactagtttaccctgtttattaacttttatttttacttaatagtggatcatctgacagtaggtatcttaattcaaatattgtttcaaggagacttgattttgctgaagtatttgctatataattggaagttcagtctaaggttttgtataaggactttcattgaaaaattattcttgcataattcagagctatttcccttgagttcatgaactaaagattggcttaaataatataaattcaaaggaacttttatacatagatcccaaagaataaaactcattactactatgcagaaatacatatggattttattcatgtgttagaaaattttgtaatgtttcaattgttttattgaagtgtggaagctatattacccaaatatactatttcataaatagggaagtatgtagcacacatataaccaattaaaatattttaatttcacaaagtttaagcaaaacacatttttttcattaaaaaaaactgtggtcaacaatgcttttatgtaataacctaagcaaaggaaaaacttattttctgcttactatagataaataattcatctaagaccatgaagtcacatattaggccttagttattgtctcttgggaaagtacagcgaagacattaaaatgcatatttatgtaacatacagcacatttcatgtgacagataattatctggagctaatggtagcttataaagcagagttgaaagggattagagaatggtgacatggggcaagataaatgtttttgaagaccttttctcccttttccactgaagaaataaagtctttaaaacctaagttgtaattaaatatatttatttgttctaggacctgctcctccaatttaaagtcagtttggccaatgaacacaagcagatttgcagatcaccatgacctcttaacagaaaccaaaaggccaatagatacagtcatctctcagcaagctttttatagtgatgaatctgtgtcagcaatggaaaagcaatacctgcgtaacagtaatctcacaccacaacaaaaaatagatgaacttcatcatggatttactggtttagatcttgaagaacaatggatgtacccctcacgaagtgatcattctaactgtcacaatattcagacaaatgatacagctaagacaacattccaagaatatccacttatcaaaaactgttttacaccccaaactggtctgtctgatatcatgaaagaatcaggagttgatatctaccattatggaagagacagaatatgtactaaaggtcttgaagcaccactacagcaaaaaagggcagagatgtttctttctcaatttaatagatacaatgaaaatgtagattattgtagatacccagagtatgttcatcctaataaggctaagcttaataaatgttcaaattttagtgtccaagatagcaaaaaattagccaatggcacacctgaaacaccaactgtagaagcagacacctacacaaagttatttcaggttaagccagcgaatcagaaaaaaatggaggagacaatccctgatcagcagaatttcacatttccaaaaactacgccacatctgacagagaaacagtttgcaaaggaagcagtattcactgctgattttggcttaacatcagaatatggactaaaacctcacacagcttgtcccgctaatgattttgctaacgtcacagaaaagcaacagtttgctaaacctgatcccccacattctgagtattttaaatcagtgaatttattatcaaactcagcaacatcttcaggaggtatcaatttaaacagaccaacttggatgaatgttcaaacaaaaaataacactcctattccttatcgaaatcaaggtaacttgatgaaattaaatagtcatttaagtgcagcttcaaaaggttctaaccattcttcagatttcccccaactatcatccacaaacttaaccccaaatagcaatttatttcagaaatattgccaagaaaacccttcagcattttctagttttgattttagttacagtggtgcagaaagaatccaatctgtcaatcacatagaaggactaacaaagcctggagaagaaaatctcttcaaattggttacggataaaaaaataaagcagccaaatggattttgtgataactattcagctcagaagtatgggataattgaaaatgtaaacaaacataattttcaagccaagccccagagtggacattatgatcctgaggaaggtccaaagcatttagatggcttatcacaaaatacataccaagatctactggagtcacagggtcattctaatagccacagaacgagaggtggagacaatagccgtgtgaatcgcacacaagtgtcatgcttttctaataattatatgatgggagatttaaggcataatcagtgttttcaacaacttggttcaaatgggtttcccctaagatccacccacccatttggccattcagttgttccactgttggattcctatgacttactttcttatgatgacttaagccatttgtacccttattttaatatgatgtatggtgataattctttttctggtctcatgccaacttttggatttcaaagaccaattaaaacccgtagtggaccagccagtgaacttcatattcgtctagaagagtgctgtgaacaatggagagcattagaaaaagagagaaaaaaggtaacacaaagttaaccacttaggaataacagtatgttccttttgcctgtcttcattctgtttaccttagtgtagtgtaagagtacttgccttatttctttttgctttatttgttgttgttttaaagagacagagtctcgctctgttgcccaggctggagtacagtggcagaatcatagtttactgtaaccaaactcctgggctcaagcaatccttcctcctcctgagtagctagtactacaggcacatgccaccatgcctggctaattttaattttttgtagacattaggtttcactatgttccccacggtggtctcaaacccctggcctcaagccatcctcccaccttgatgtcccaagtgttggcattacagatgtgagccactgcacccggctaacttgccttatttctgagctgaattctataatgtccaggatttgctgtaagttcattactgtaaggaattaagtgggttacttaaaaactaaaaatggatggggttggccaatgggaagcttaaataaatgaagatgaaaaatgcttgacattttaaagttattgttattctaagttgacttgccctgaagtagattttttacccccttagttgttacaagtttatttctttgaattttgtagtgttaacctgttggtatactcaggtattttatttgtattaagacgatagctgggcgcggtggctcacgcctgtaatcccagcactttgggaggccaaggtgggcagatcacaaggtcaggagttggagaccagcctggccaacatggtgaaacccagtctctactaaaaatacaaaaaattagccaggcgtggtggcaggcacctgtaatcccagctacgcgggaggctgaggcaggagaatcgcttgaacccgggaaacggaggttacagtgagccgagactgcaccactgcactccagcctgggcaatagagtgagactccatctgaaaaaaaaaagatagaaaaatactgtggtattgtggtttacatttgttgtcttttgataccaaaacagaattttcatttaaagtggtaatactctatttattaggcttacgaaaactattattcatggtcgaatcatatttagaaaattctacatctaaaaagtatgtaattttttacagactgaattagcccttgccaagaattatcctggaaaaaaagtatccagtactaacaacactccagttccaaggctgacttccaacccatctagagttgatcgcttaattgtggatgaacttcgagaactagccagagtaagctgtaaaaatagataacagtggatggattttttgttaaattttttttaagtttcaggccaggcgtggtggctcactcctgtaatcccaccactttgggaggccgaggcgggcagatcacctgaagtcaggagttcgagaccagcctggccattatggtgaaaccccgtctctactaaaaatacaaaaattagctgggggtggtggcatgcgcctgtagtcccagctacttgggaggctgaggcaggagaatcatttaaacccaggaggcagaggttgcagtgagtgaagatcacgccactgcactccagcctgagtgacagagcgagactctatctcaataaataaataaataaaactctcatcaagttttagagctttgaagggtttttaaatcacatttacatctaactctctgaaatatatttttttcatgtttggtcctagaactataatatttaggaaaggggctgggtgcagtggctcacacctgtaataccagcactttgggaagtggaggtgggagaatcacttgagcccaggagtttgagaccatcctgggcaacatagggagatcctgtctctactaaaaattaaaaattagctggacatggtgtcacatgcttatgctactcaggaggctgaggtgggaagatagcttgagcctgggatgtcagggctacagtgagccataaccacaccattgcattccaacctggggaacagagcaagatcttgtctcaaaaaaaaaaaaaaaagaaaaaaaaagaaaaaggaacgggaaaatagtcccactcaatcattttaaaagtaattttcgtaatttaaatggttcctcttgaagctcaaattggcagtggagctaatcctcaactgaaagaattttttaaaaagcaaaaatcattttgagtattatttatggagaaagtctcatttctttgtcacatttgttttccagcttgatgagcaagctgtgcttacataagatggtaacttaatagggaattactatctttccttttttttttttttttttttgaggcgggtctcactttgtcacccaggctagagtgcagtggcatgatctatgctcactgtagccttgaccttctgggttcaagagatcctcctgcctaagcccccaaatagctgggactacagatgcacgctaccacacatatctaatttttgtattttttatagagacagggtttcgccatgttgcacaggttggtctcaaactcctgagctcaagcaatccacctgcctcagcctaccaaagtgctgggtgtgagccaccaccagtcaacaaaatacttttgttttggcgaagtaggatatgacttcaagtcaaatgttgtaaagaatcctcgttaagtcattttgtaatttaatgattattcctattctttataatttcagaattttctaagcaacttagggtaggtaaacttttccttttttgaccttcctctcttaaaaacttagttttccaaataaaatttgataaagattcttcctgggaaaaaaaaatgcagcaaaacggattacctcttttattgaataaaaccattttaggaattagaaaaatcaacatgggtcaaatttgtaaatctgtacaatggaatttatccatggtacattcagagcctaacatatgaggtacagccagatgttaataaaaacttcaatcttttattatttaaaaaaaaaaaaaacttccaaattaaaatttctttatctcagtaatacatttctaggaaatgaaggatgacatactgtggatagtgatatacttttcccagctttgcttatgcttcacattaatttagaaggatatgtttatgcctgttataataattttattttctttacaaaaattagctgggcatggtggcatgtgcctatagtcccagctactcggaaggcttaggtgggaggatcacttgagcctgggaggcagaggttgcagtgagctgagatgataccactgcatgccagcctgggacagagtgggaccctgtctcaaaaaaaaaaaaaaaattcattttatctatacttagcaacattatttcattaacagaggattttaaaattacattttcgccgggcgtggtggttcatgcctgtaatcccagcactttgggaggccaaggtgggcggatcacaaggtcaggagatcaagaccatcctggctaacacggtgaaacccggtctctactaaaaatataaaaaattagccgagcatggtggcaggcgcctgtagtcccagctactcgggaggctgaggcaggagaatggtgtgaacctggcagacggagcttgcagtgagccgagatcgcgccactgcactccagcctgggcgacagagcaagactccgtctcaaaagaaaaaaaaaaaattactattttctagtttgctagctttgtagaattttgaaaaaaaaatattttttaaactttatttaaaaatcacctgtgcagacttttctctttttttgagatggagtctcactctgacaagatcttggctcactgcaacctctgcctcgcgggttcaagcgattttcctgcctcagcctcctgaatagctgagattacaggtgtgtaccaccacacccgactaattttttgtatttttagtagagacagggtttcaccatgttggtcaggctggtctcgaactcctgatctcaaatgatccgcccgcctcggcctccccaaagtgctgggattacaggtgtgagctacagtgcccagccccaatttgcacatttctttactctttatcatttgctcaaaattattgtcttatttaaaaataattagtagttccctggaggtttttttgtgtgtgttttgttttcccctgaaggatctggctgatacacagttgagaggaaaatatttaacatacggaatagacttattatgaagaaacttaatacgagtttgaggttagagaaacattaattccagtgccattggtttcttgagaagctttttccccctatattctccaatcagtgaacaccaagttctgctatcaattgttaaatcatttaattcccaaagacaattactgtatttacttgatcttcaaattgcaattattcaaaaagttctctttccatatactttccaagtttagaatttgaaacaagttaggcatatgaaacatactccccctactgacctaatatatcagtgcccttttttaagtttcatcatccagaggattgagaagcatcctaattttctttagcagttttgacagttacaggagtcattttgtattgttttaatgtaaatttaaatcagtattttctgtattatggattccttaaagctatcactagtcagtattactatctgaatatttctgatttccaaaaagggaacattggaggcccagaaaaattaaagacttgttgaggtcaggattaatcagtcaagtacttctctttttagctcaaaactttttccattagattacaatacttcctaacaatgctgtttgcaggctggtctcttatttgtcaaaaacagtatcagatcttgtatttgcagttaatgacatggtaatgtttgaatatttaacattttcattgatgcttattttcagtaatcaactaccacatatttttagaattaacatagacaagtagatagaaaacactttccatttttgtttcccccagcatggtgtcaggacacagtaagcattctttgatttattgaatgaatattattgctgtcatctctattctgcttcactgaagatttgtttttacttaagttaatggcaggacatgtcttatcaaaatttaaaatgcttccctcaggttgtgactttactaggcaaaatggaacgtcttcggagttctcttcttcatgccagtatctctactgctcttgatagacacttggagtctattcacattgtacagtcacgtagaaaggatgaaattgttaatgcttccaatcggcaaaggcaaggagttcctagatgccaagatgacagaggtacaaatattaatgcatattcttgtgataagtcagtgtgataatttaggtattgataaaatcagattctgaggttgaaagattagatttctaaaattaacacttacctacagaataaattggtaaataatctccacattatttactccaaaagtatttccattttattaattttgtctgttataactgtttcaagacagtctgtgttctactcaaactatagtcactattgtacaagtcagaaataaagtatcaatacttttaaatattttaatgataaaggacaggactttggttcaatcaataactatcctttttttacaaaaataacatttgatcatttagtagcaaaagcactgggttttgtaagatttaacagatatttaaatggcatttaatatgaaatgaccctgaatgtttattttacagatgtttttgcccttgcttctgcaattaaagagatgtgtgtggctactcggaaaacacgcactgccctgtggtgtgcactgcagatgaccttgccaaaaacagccagtacagctgatgtggtaaagcctttacaagatacagtaaactgtgaagataaagtccatgaaagcataaatagtagcaatccaatgaaccagagaggtgaaacaaacaaacattaaggaaatgccagcagaaagaagaataaaaagctgataaatataccaagacatgctaaaaatgttttaatgaacttgtcaaactttcagtatgttttctttcagatttaaagttaataccagtaccttaatgaagtctaacttctatttaaaaatcttctatttgaagtgaatccgatatagttttaagtaaacgcaaaggtacagttgactactcagagttctgagtagtcagataacaagtttaagtaaattaaatatttcctaacagctaaaatgtgcttaaactcattctgccatgcaggtaaatgcaaatgtgaaattcttctaggagataaatttcatttaggtttgtcttagttaagtataattccaaataatgaatctaagtgactgtaacccaattacggctacagcctagtaaccaagacaagttttgattgtgatatcaaagtgttttccttacaaaactggataatacctgggaaacaaaggaaaatacggataaacccaatattcatgtacaaacttaatatttaaaatactatactaccatatttataaatttggaatcttaatgcctaggtatatggagggaaatgcatctgattctcctaaattaatgataaaagtgtcagtgtaaaaaccatgcaagttactgaatataaaacctattcagatcatttgtgtatattctttaaattttaattatattatcaattgttaaatgtttccaattttaaagttatttaaattgaatcacaaaacattccctttatctggatcttttagacttgatgcacagtaactgaaataatgactactgttttaatacccttagtttgctgccttttatgagggtgtcacgaagttctaaaatgtatttttttaaaggttaatctctaactagtttagcttgcaattggttagtgtatattttgtgtagttgtgttcattagtttgcttctaagttctaaaatgtattttttaaaggttaatctctaactagtttagcttgcaattggttagcctatattttgcgtagttgtgttcattagtttgcttctgtatttttttaaaactattgaaagcttaactttttctgtttctcatcacttagtatctttgtatagaacttgagtaatttattcgttaatatgaaatgttggtattatgtgactcagaagatcttgggttttaacatttctagcatgagttaaactataatgtactgatgaaatttaattgaaatatccttgactagaaacactgatgttttaaatgttagtgtttttcttagttttagaaattctggtattaaaaaaaaaaagagtgtaatcataccacataaattttctttagatgatgtgcagaagaaactgattgagaatgcaagagtaactgtagggagaaacattttgatcactgatatgccttagaactacccaaatgaattacattgagggtagtcaaataaaatagatcatctcaccacagtcactgcatagaaagtggttaagtttaacataagacatgttggatgttataaaaacaaatactgtactgaatttagtctcaggaaaaaaataaattactttgttgaaaacatttggtttcatttttctaaattcatatgtttctaaccttaagagtcactcatatcagaaagtcaaatgaatttcatttaagaacttatactaagttttagatttcattattaacgcacaagtaataatgttggtttataaatcaatgccattcagatatccatggatctaaccagatctccttcaaagatgaaatttttgctctatctttatgctaatccgtgtaaaccagaataaaaattttagggaagcttttacatgatactggtcagaaatgaaataccagtccgttaataagaaccaaacacttaaaaaaattctttgaaatattgttaatcatatcacccaatagataatttttaaattagtcggttgtccctttcagtggcatatcctctaacagatggttcttatgtacttgtatttctgaattacaacctataaaacattgtacttctgaattacaacctatgaaaacattataaaacttttacaaaatttgcagtgaaactgataaaactgatgctcccgccatttctaatctgaaagaacttggtgtactcattctttttaatggaaaaagcaaaattaccttgagttgttatcagtgtccttctcacttgaataatctgctactataaagttttagagggttgagaatttatgactgaaatccaaaatctggcctaaaactcaatcttaccatagaagatatggttgtttaaaatttgccctttgcagctgggtgccggtggatcacgcctgtaatcccagcactttgggaggctgaggcgggtggatcacgaggtcaggagatcgagaccatcctggctaacacggtgaaaccccatctctactaaaaatacaaaaaattagctgggtgtggtggcactcgcctgtagtctcagctacttgggagggggaggcaggagaatcacttgaacccgcaaggtggaggttgcagtgagccaacatggcgccactgcactccagcctgggtgacagagtgatccgtttcaaaaaacaaacaaaaaaaatatgccctttgcaatactgaacattttagacgtaaaggatttattagcacctgagtcaagtggataactaaactcaaagcctaatgagctgatcctctattttctgtttaagcattagtttgagagtatacttaactgtgacatacatagcagagtcccagaagaaagaactgactactaacaaattgaaacaagtacccttcaggggaccgtggatataacctgactccttcagtgacaaaaatcaaggtgagaacaacccaaaatcccaaaataaggattactaaattaaaataggctctatcataccctatcgctaccaccacataaaggactaagactgtaatagtaaggacctctaagccaatttcctgatgttccaaaaaacatgctaatctttctgatctaattcctacttcacaaaaaggaaaattgagaaagaggatttatggattccaggaagagcttccactagtggaatataagttatagggctaatcaaaacaaagcataaaataaaaatcaacacattcctaagtaactactcacacatatttcatttccatgggtacgtagaagcaatcaaaataagtcagaagacagcaatttaaataagatttatttttttaaaggtggttatttttattttttgcaatgccacagttataggagtgtatgaagaggtaacatgtctccttttccttaaccatgtttttttttttttaaccttctgcacaaaggtaaaagtttttgttaatctcatagttaatggtataaaacagagattggcaaacctttcctccaacaggccaggtagtaaatattttagatttcacagaccacatatttttttcttttataactctttaaaaatgtaaaaatcatttttagtttgcaccatacaaaaacagactgggccaaattcggcccgtgggcagtagtttgccaacccctggtataaaatatctactttgtcttgtcagagaaattgctgtccttaggcttctagacaatctgctgcctgaagtcaagtggagaagggccttatttacaatttaatgtggtttgtgacagaagtagaaatggagagcttctgctcacttttgactctcccagtttttccattcactcattcattcaataaatttgttgagcacctactatgtacactcttaaatatcttggtgttagcagaaatttccagtgtttcttccttaaaagggtgatttctccagtttctccaaaccaggaattatttcttaatactcatgttttatggaaaaatcaggattaaaatctctaccagcacacaagaggatacatgattatacaaaatgaatctagccaacaatgatatccttgcacccaatagtgacacagcctagatgaggaaaatatgtaactatctctattttaaaagatacctcttttcctcccacaggctgaaactttcaaaaaaaaaaaaaaaatcagatctagaacaccccgcaagtaatttcttcccattttcctagttttgctgccatgttaacataaaatctggatccaggtaggcctcttcattagctttctatttcagccataaaacaatactacacttacagctgaatactgactccaaagcaatgtgcatgcccacattttatctcagggagggattgattatgtttctgctccttcagaatgaaaactgttagctttctgaatcctatttatccaaggtgagggaagactttttaaagtggccaaaaggagcacaggacttgagtattaaaatataaaggtggcccccattccagatctttggtacagtcatcaactataataatctgattgcccaccccaccaaaacagcacattttgtaattagaagtgattttgattttccttttgaccatgtaaacaataggggaaatgccttgggaaactactttgcaatgcactctcatttctcttaaatacacaaccagttctccctttgataagttcatggggggaaagaatagagtaggccaaggttatcgctttcgctcccctctctgtgtcctttttttttccttttccttgcgctcctgcttggctagtttgtctctctccctctgcagcttgtcctgttccttcttcctttgggattcatcccgaagtgagtctcgctccagttttcgggcattaaggacatcttccacattggtgtttcggaacagaactacaggtgagttaagggattagggtacaggtcacacagatcacacctactgctgcctttcctcattctacttatcctctctccacctgctgagtcctgaatcgtctttatctattcctggttttttaaaaaaaacccttatgtttatccttggtctaacagagaaatcctaaagctatattacaaaagttttaaaatgtcctttggaataaaactcttattcagatttacctaaatctgaattttaaaatattttaccaaagaaacaaaaaaataagaaaacaaaatatttcatcaaaatgaaatttcattctagaataagtacttatatcattcaatggcagaatattagagaatctaggctagttttggtgaacagagtagtaatgtaactgactaaatgtttatgtacttggctctgttaaaatgccttaaaagagttaaataagatgtttaaccttattaaactttatcaatttgcttttgttcctagactactaaagctgaagtgaaaaccacattctaataaccatacacactgaatctataagagatagaaaatgagtttaggctgggcgcagtggctcatgcctgtaatcccagcacttgggagactgaggcaggtagatcatgaggtcaggagatcgagaccatcctggctaacaggtgaaaccccgtctctactaaaaatacaaaaaattagccgggcatggtggcacacacacctgtagtcccagctactcgggaggctaaggcaggagaatcactttaacccaggaggcggaggctgcagtgagccgagatcgcaccactgcactccagcctgggcaacagagcgagactctgtcccaaaaaaaagaaaaaaaaaagtgtttggtgtttgtattctctgacaaattataaggtttttgaggaaaaagagaaaatttcaacattattttattattttttgagacacagtctcactctcatatcccaggccagagtgcagtggcaagatctcggctcactgcagccttgacttcctgggctcaggtgattctcccacctcagcctcctgagtatctgggactatgactataggcacatgccactacacctggctagtgttttgtattttttttagtagagacagggttttgccatgttgcccaggctggtctcaaactcctgggctcaaacgatccacctgtctcggcttcccaaagtgccaggactacaggtgtaagccatcacgcctgacctcaatattattttaattttctccctaatgctgggcaactcagagtatagatttttatttttcccttagaaatccttcctccaaactaatccctttacagtacttgttaacttgttttctctggggaaagttcttgctaaactgactatctagggctgtcctaggaatagggctcccaatgttagcatgacatgagttcctgaaggtaaaggggagccgccagcaatgacagcaaaataaaaactgatctcaagaggactctatggagaaacacatagggagggacccagaaggatacgtttgtcagaaccaatgttcattgtggtagcacctgaatcatccttctcatctgcttcagtaagtgatgttaaggaaagtcagatggaaaacaacatcccaacctaacattagaaaacattcaatagactggtaagtaggaaaagcacactgaatggagggagcacattatcagggatatggcgataaacccaggagattcatctttggaaacctcaacttaggaaagattgatatatcttctataagatccttttcttggaggctgaaaagaaacttaagttggtctgggtggattgccacattacctggaagccagatgacctttaaacagtggttctcaaagtgtggttcacaaaacccccaggaatatattagaaatacacattcttgggacctatgccaaacctactaaattgtgggtgaagcccagcaatctgtgttttaacaagtcctccaggagaaccactgctttaaaagtccttttctagcccaagatgagaaattatgtcaccggaaccatagctctgccaaccctggcaagaaaactcgtaaaaaaaaaattagaagagaggccaggcgcggtggctcacgcttgtaatcccagcactttgggagggtgaggcaggcagatcatgaggtcaggagatcgagaccagcctggctaacatggtgaaacactgtctctactaaaaatacgaaaaattagctgggcgtggtggcacgtgcctatagtcccagctactcgggaggctgaggcaggagaatggcttgaacccgggaggcagaggttgcagtgagccgagattgtaccactgcactccagcctaagcgacgaagcgagactctgtccagaattattctggtattgctttggaggttcagccttacttttaactacctggtcacataagaaagaaaagatgcaagctgctctaaatttagagaatctttcacccaaaaatacccaggttctagtcctggttttgccactaatcttctgaatgcctctgatcacccattcatctgttggtgtctcagtttccttattgactgggaaagaacataaagatggattatactttatactacactgtatagaaaagtattatacaaatataaagaattacagctatattgtattttctgaaagcataatataaatggactattaagacattatttgttttacaccaaagttttcaggaatataatgattatgtgttgaaaaatataagtccagtatcaactaatccaatatcactccgcatatccacaaagggccatagattactgccattttagaggggaaaattaagctatagagggggattagcaacttgccaaaggtcactgtaaacccacaaatatgtctggcttgagctttagggaatggtgccgagactccagaaaggatattcctcttcatctgtcacatcagcatactgggccaggagggcagcttttctctgcttctcctcttctgacaccatccttggctttactacgatttgtgcctgcttctcaattagggtggcaatggcctgtacttcatctgggaggtggtggaaggaagaacaaggttgtatgagagagaacaagctcactgaaccactagtccacataggcagcacttgtactgaagacattggcatctgctgcctccttagagcctggcagttcaaaggacatggctcgggggccattgagaaaggaaaggaaaggccatgcaggccaagctttgtatccatcttcaatcagagcagccctgattttacttgttttatatactgaagttctgctgccttaaaaaaaaaaaaaaaaaaaaaaggttgaaaagcactgcattagaaccacagaaaactaagcctctgaacactcaacttccccatggcatcccaaaaacctaagcaggaatctaaaatcaacttaagctggtcctgtttatgtttctgattatgccaggtggaattcttagattaagaatattttggccgggcgcggtggctcacgcctgtaatcccaacactttgggaggccaaggcaggtggatcatgaggtcaggagatcgagaccatcccggctaacacagtgaaaccccgtctctactaaaaatacaaaaattagccaggcgtggtgacgggcgcctgtagtcccagctactcgggaggctgaggcaggagaatggcgtgaacccggggaggcggagcttgcagtgagccgagatcacgccactgcactccagcctgggcgacagagcaaaactccgtctcaaaaaaaaaaatattttgccatgctataaaataaaatcaactagtaagttctccagtctcaagaaaaggaaacaatggtgtaaaatagtagttctcacacttggttgcacattagaatcacctacaggagcttttaaaaaatacaaatgcctgggccccaacccaggtacattaagtgattctaatatacagccaaaactgagaaccaacagtgtacagagttcagaatctttccaaatttggcttttatgatttgagttttctgtacctaatttaccatcctagtggtgggtatattcgcccatttctcttccattttaaagggtaaagtgtttagctgaataaagccaaataccaaccataatttgtgttatgaaatgacaacatgaggcagggtgctgtagctcatgcctgtaatcccagcactttgggaggctgaggtgggcagatcacatgaggtcaggagttcgagaccagcctggtcaacatggtgaaatccccatctctactaaaaacacaaaaattagccaggcatggtgacatgagcctgtagtcccagctattcacgaggctgaggcacaagaatcacttgaatctgggaggcagcagttacagtgagctgagattacgccactgcactccagcctgggtgacacagcaagactctgtctcaaaaaaaaaagacaacatgaaaaaagtaggaagtggtaaaaatatagttgactccatacctgcaatgcaaatctacaagaagcagtggaaagatgatgaaaaagaaaaagtaaaaaaccacaatgaagaaaactgtggtcagtcgaaatggaaaaatgcaaaaaaagaaaaggaagccaatgttcagtaaaggtaacacaggctgttgggtgtttgccagtgtacactatcttcgggaaaatgagcatccaaggggaaaatgaaaagatctcttcctaacagctatacagtcaaggctgctggaaaaggctcaggaagttaaacacagaaactctgactctaccttcttttttcactttggtgacaacattctgagtttctgaccatcgttccacaatctccttgcagatattaaggagggaatcttcttcctagttggaaaagcagaccaattaatttcctgagggagccctcaaaaacaatagtaacctcaaaaaagcctatgaagaaagcacagctctccatgctgtgaaattatggaagggtctgggagccacaatagagtatgtttcttttctgaggctctggacacagaattgatcctgcttgtgtgtcccagaacccacacctcctacatcaagaacagccactccatcctgataagctccaagggaagattcataccaactcagggcagccttcctcattctctcttaaaatatttattttatttttaattgacaaataataactgtatatattatatatatgtagggtaccctgtgatgtctcaatatatgttcacattgtagaataattaaatcaagctaattaacaaatctatcacctcacatatttctcatttttttggtgatgaaaacatttaaggctgggtgcagtggcttacgcctgtaatcccagcactttgggaggctgaggagggcggatcacttgaagctgggagttcaagaccagcctggccaacgtgctgaaaccccatctctactaaaaatacaaaaattagccgggtgtggtggcacatgcctgtaatcacagtactcgggaggctgaggcacaagaataacttgaacccaggaggcagaggttgtggtgagccgagatcacgccactgcactccagcctgggagaggggagagaaattgtctcaaaaaaaaaaaagaaagaaagaaagaaaacatttaaaatgtactcttttagtaattttgaagtatacaatgcattattatttatttattattattactttttagagacagggtctcactctgttacccaggctggagtgtagtggtgcaatcacagctcactgtaacctcaaactcctgggctcaagcaatcctcctgcctcagcctctcaagtagctaggactgcaagcatgtactaccacacctggctaattgagtttgttgttttttttaaaagatggggtctcactatcttacccaggctggtctccagctcctgacctcaagcaatcctcccatcttggccccctaaagtgttgggattacaggcctgggccaccacatccagccgattattacttattatagtcaccattctatgcaacagatcactaaagtatattccttctgtctaactgcaattttataccctttgatcaacaatcttcccttttcccatccacctcccccaattcttttggagcaaaaacctgttccctaagtcaaaactcctctgtgaaatattccttggctgacgtatacaattcagaaccttccctaaggttatcaactttcatgctagatcatatccattagcttgctgacacataataaagaggagatacatgacaaaatggtctcttgtccaaccatcccgctgtccattttagagaagcatacatattctgcataccaaccaatctccctcctcagcatgatataacaaaaatcttgtctttagtgttagagatacttaagttcaaatcccagatctgtgaggaagtttcttaactttctgatcttcacatcctcccaggattttactgaggataaatgaaaatgtatataaatgcctaccctacttgtcaaagaacaagcatctaataaacacgagcacttccctccatcttcattacggctgcattccccaccttcacgttctacctctcagggcaagctgtcagcattcacatttattaagcatttaccatgtgccaggcactgctctaaaagccttacatgagaactctcaattattaaaataatgccattaagtactattttactctcaatttatagaagaggaaaccaaagcacagaggttaattactttgcccaaggtcttacaagtaataatggattaaacacaatttgaaccccagcagtttggcttagagcccatgttcttttttttttgagacggagtctcgctctgttgcccaggctggagtgcagtggcgcgatctcggctcaatgcaagctctgcctcctgggttcacgccattatcctgcctcagcctcccaagcagctgggactacaggcgcccgccaccacgcccagctaattttttgtatttttagtagagacggggtttcaccatgttagccaggatggtttcgatctcctgacctcgtgatccgcctgccttggcctcccaaagtgctgggattacaggcgttagccaccgcgcccagccgagcccatgttcttaaccatctcccaaagaaaagtggagagtcagaacacagacttattatgtatatccttattttgtacccagcaaaggatttcttcctctaccttgcatccttttagctacatgctagacacacagaacttccttggtccagagtttcaatagttcatgggtttcccccaacccccaccagcaagaaaagcaaagaaacagaaaaagaaaaaaggatgagaaagtggtacagctcttttaaaatcccccaccaaaagaaaaagaatggcaggaaaaggagcagcagagaggcaaaagagaacgggaactcttaagaggacaaagtggtttatttcctcagtctcctcatccaaatcaatgtagttcaatcatccattccttcatttatttatacagaaggtgcctgctatgttcaaggcactaagaggaaagtttatcctacttacaatgctcctttttccctggcacttatcactttgtaacatactatataatttactagtgatgcttttccatgctagaatgtaaccgcatgagggcaggaatttctatctgttttattctttgaagtgccccaagcacttagggtagtgcctggcatacggtaatccatcaataaaaatttgataaatcaatcaaccaatgcaagtactattgaagagaaggatgataaaagtttttgtttactgttatttgctcctaactatatgccactgttcttgaattttacctcagattattgctaacaaacttctaaattcctcatattaaatcctagcccaagtcaggcacagaggctcacatctgtaatctcagcactttgggaggccaaggcaggaggatgtcttgagcccaggagcataagaccaccctgagcaacatggcaaaaccctgtctctacaaaaaaaaattttttttttttaattagccaggcatggctgggtgtggtggctcacgcctatagccccagcactttgagagactgagatgggtggatcacttgaggtcaggagtttgagaccagcctggtcaacatggtgaaaccccatctctactaaaaatataaaaattagccaggcatggtggcatatgcctgtaatcccagctactcgggaggctgagaatcacctgaacccaggaggcagaggttacagtgagccgagattttgctactgcactccagcctgggtgacagagtgagactttgtctcaaaaaataaaacataaaacataaaaaaaaaagttagccaggcatgatatgtgatggcaggtgcctgtagtcctagctacttgggaggctgatgagaggggattgcttgagtccagtcgttcaaggctacagtgagttatgatcacattactataacagagcgagactctcttaaaaaaaaaaaaaggcaaactaatgtctacctttatcaacagaaacagctccaaataatgatggactgatcaagaagctggtaccaagaagtctcaaagttatttcaacagcttcatggagtgtttagaaacttcccagctgtaaataaaaactaccttaaattgcttgcctcctactctttctccctataatctgtaatgttgtggtccaaaaaaagaattgattccactgtcttgtatttccagtgaacttccaagcttcctcacaggctgtgttaaagttttcccatttataagccaatcttgccagaagaggctctggaactcaaatgggttactgccagaagaatctgggacagctgcactagtgttatatttcaaccatgtacccaatctatgaactgcttccaccaaatgtgagtgattttttcctagcacttgtttccgctttcacaaaacacttttggatttgaaaatgtttctgccttctacccttttaaaaaaatgagatatgaatatgtacatttatatctatatatatttatactaatttttttttctttgagacagggtcactctgtcacccaagctggagtgcagtggcacaatcacggctcactgcagccacagcctcctaggctcaagtgatcctcccacttcagacttctgagtagctgggactacaggtatgcgccaccatacctggctaattttttaaatttttttgtagagacagggtcttgctatgttgcccagtgtggtgtggaactcttggcctcaagcaatcctcccacctcagcctcccaaagtggtgagattacaaacatgagccactgtgccccacctcatggtacattttgattctattactagcctttcaaaattggttttgagaataacaaagaacccatttttctaacctgtccattgtaataaatgccagaggataaagcctttgatggacagacaggtggctctcacagtagcaatcaggtatccaggatctcctctaatccatgaatgcagagacaactctagcttctacagcatttagtgatgattcaagtaaattttatttttaagcttgtatttaaaaggaaacaatttgttagacagccacaggtagcacctacaaccaatttaatctgtaataaccagtctaataagtgtgtatgttggaggtgtgggaagtgaagatgaaggcagcagaaatgatcaggttgaaaaagtggacatctgggtgacttactatgtaaacatagcttaaagtacacatttctgaataccttgcttctaacaggctaaggactaagtttctctctcttcgttaaagctctgatctctctcataccctccttcccaccaccaatgattactgtaaatactgtaatggatcaagcacgacgtttgcttcagttctgcgtgggcatgaaaagacttctaccaccagcttaccttttatggactcctacatccatataagaatcaaaagggcacttcctgcaggcttctgtcatgggacagccctgggaactgccttgtaataggcacagacctcccaagagcattttaatacccccagtgaacactgtaaacggatggaaatggaattggtcgtcagatatttatgataacattcccattctgacatttcaatgccttcggaagaaccctcctcggctcactcacaagcatcggagagggccttgtccccaagaatacgagaaagcccttcctctctgtgtacctgcagctttcaggcttcccacacctggttggggagcaacctccttcccccgccgcccagatatcagaggagtatacctctcccaggtgagaccactgagcctctgggatacccggtaggggagggagggtgcaaagtactgacaggtcctcagatgctggccagaggctgaaggaatgtgtccaggctactcaccaggaaagcagagaggatcccctgcagagcgtccagcttctcttcttcctcctcctcctgcaggatacccaagatgtaggctccataaacggctcggtccactcccagtgcctccaaccgtccgtccagccaggagccaaagccgccgcctccgccatcgccttcgccaggggctatcgcggccacttcgctgggcgccgccatcttggggtcagggtcctgcaagcccctagggcgcctaccgcagtgcctgacgggccgcgccgcaggtccaccgcgcatgcctgaagaggaagcccaggcccgtaagtgcaaagagcgcagccgtgtcggccggcttgagagttttgtgctttctagatgaagcgcgtcttcgcatacgtgcggtcgcgtgatctcacaagatgcttggcatgtgagtattcttaacagactcattctacagttcgggaagttgagagaggtgcagtaatttggccaaagtcacgcggctaataactacccaggactggagctcagcgtggatgccatcgcttcctccacccgaccgagctgccttccccgcgctttcgggggatgctggccgcccactcccacacagctgtctggcaagaacctcctgacagcctggaataccctcgtcgtcgctaccgacggctaccaccttcacctgtacaagcccttccctgtcaaagtaaaggttgcagaaaaccttccctgattccatggtaggcactcagtaaataaacaggcaacctcaagttatttcttccactcattgattcaacgcgtgcacgggactattctttgagaagcgtaccccaccctctgctaggcactgtgccaaaagcttttcatgcattatctcttgtaatcctccctacagccctgtggggagatgcttttattgtccacattttaaagataaggagacaggccgggcgccatgtctcacgcctgtaatcccaacagtttgggaagccgaggcgggtggatcacctgaggtcaggagttcgagaccagcctggccgacatggtgaaaccccgtctctagtaaaaatacaaaaataaggccgggcacggtggctcactcccgtaatcccagcactttggaaggccaaagtgggcagctcacctgaggtctggagttcgagactagcctgaccaaaatggagaacccccgtctctactaaaaatacaaaattagccgggcgtggtgggacatgcctgtaatcccagctacgtgggaggctgaggcaggagaatcgcttgaacccaggaggcggaggttgcggtgagcagagatcgtgccattgcactccagcctgggcaacaagagcgaaattccgtctcaaaacaaacaacaacaacaacaaaagccaggtgtggtggcgcgggcctgtaatcccagctactcagaatcgctggaacccggaaggcggaggttgcagtgagccaagatcgcgccgctgcactccagcctgagcgacagtgagactccatctcaaaaacaaacaaacaaacgaacaaacaaaatcactaaagataaggagacagatatggagagagtcacacaactagagggcgcctaaccagtggcaagaactcttctttggcagagttatgagagcttcagctgacgtcaaaacacctggctctgggctggaatgaattacccaagaatttggttggctttagctgaagtgcagaggaagctggcaaggtcctggctaactccttcctcaaatatgtactgagtaccttcagtatggcattgttgctggcactgaaaacacaaaaatgaatgtcacaaaatatatgtcctcaggggtttttaatccattaggaacagacatgtttaaacaaatgatgacaatatagtgatataaatgttttaatggagctttatctagcggagattgcagtaggatgcctagaagattgagttaactttacctgttggagtggagttggaagcaggtggggagaggttcataggaaatccaggaaggcttcccagtggagatgatgcttgaactttcttgaagaatggtaggagttctttacataaagggactggagggaaaaagggggtagatccagatgcaggggaactgtgaattcaaaggcttgctagggggcctccagagagtcatgtatggcttgagctacaggattcaaatagaagatattcaggggataacaacaaaaaaagaaggaaaggagtttgtataccttgcagaggtcctcttattgcagaggtctacccttagtggcattgggattatgtaaatgaatggacactaaatgaatggcacagatacaaatgtaagaaatatggcagagtgtgaattttagttgcgtggcttctgtgtgctcgctgagttagatagaatgtgacactaacagagtcagaggccagagtcagcctccaaaggcttgcctctttttcaagtcctcagttattctttctaatctagtagctgtcttgcaggtagggcttgtcagttcacagacctgggtgccatcatggctcaaggatgatagctggtcagtgcagagcccccaaaccagaaaaacatcacaaaattttgttttttagaaatacagcctcacaagaagtttcaaaaatagtacatagagtcctgcacaccttcacccagtttcccccaatagtaacatcaaacataaagacagtataatagtaaatcaggaaattgatataggtattatgcaataaggtttttttggtttttgttttgaggtggagtctcacggttgtcgtccagactggagtgcagtggtatgatctcagctcactacaacctccgtctcctgggttcaagcaattctcctgcctcacccttccatgtagctgggattacaggcacccagcaccacacccggctaatttttttcctatttttagtagagatagggttttgccatgttggccaagctggtctcaaactgctgatctcaggtgatgcacctgcttcggcatcccaaagcgctgggattacaggcatgagacactgctcctggccataatgcaataaggttttttgaaagcatcaacaagcttctcaaaaactgaatcaaggttctccagaccctaaattttaagaatatcctcaatggctattttactacaaaagtaacatagctcatgctttaaaaaatattatataaggccaagcacggtggctcacgcctgtaatcccagcactttggaaggccaacgcgggtagatcaactgaggtcgggagttcgagaccagcctggccaactggtgaaaccccatctctactaaaaaaatacaaaaaaatggccctgcgcggtggctcacacctgtaatcccagcactttgggaggccgaggcgggcagatcacgaggtcaggagatcgagaccatcctggataataggtgaaaccccgtctctactaaaaatacaaaaaaaaattaactgggtgtggttgcgggcgcctatagtcccagctactagggaggctgaagcaggagaatggcgcgaatccgggaggcagagcttgcagtgagccgagatctgaccactgctctccagcctgggcaacagagtgagactccatctcaaaaaaaaacaaaaaaaacaaaaaaattagccagctatggtggtaggcgcatgtaatcccagttacttgggaggctgaggcaggagaattgcttgaaaccaggaggcggaggttacagtgagctgagattacgccattgtactccaacctgggcaacaagggcaaaactctgtctcaacaaaaaaaaagaaaaaattatataaatggataagcgacaaattgaaagcttacaaaaaataaaatacgcaaattaagattgcagtgaaataccacgtccgcttttcagatcaaaaaagtctgataatatgctgtattgaactgtgcttgggtaaaagacattggaaaatgttagagcagaaagtaaatggatctggtcttgttggaggactgtttgtttgaaaagacccagcatttctgcttctgggaatttgttcataagttattcatttatttttatctttacttgtggtaaaatacacaatttgccatcttaactatttttaagtatacgatttaatagtgttaagtattaattatttttaaaatttttggtttaaactgggcgtggtgcctgtttaaactgggcgtggtttaaactgggcgtggttggctgggcgcggtggctcacgcctgtaatccccgcacttagggaggccaaggtgggtggatcactgaggtcaggagttcaagaccagtctagccaacatggcaaaaccctgtctctactaaaaatataaaaattagccaggtgtggtaatgcatgcctatagtcccagctacttggccacttgagaagctgaggcaggagattcactcgaattcgggacacggaggttgcagtgagttgagataatgccactgcattccagcctgggcaacagagtgagactctgtctcaaaaaaagaaaaaaattttgatttaatattttgtataatggccaggcacactggcttacacctgtaatcccagtactttgggaggctgacaagggaggattgcttgaggccaggagttcgagactaacctggtcaacataatgagaccccagctctacaaaaaaaaaaagtggtggtgcatgtcttttgtcctacctactcaggaggttgaggcaagaggatcacttgagcccaggagctcaaatttacatgagctatgatgatgccactgcattctagcctgaacaacagaacaaaactctgtctttaaaaaataaaactgtgcatttgtgtagaatcacatttttctaaggatattcattgtagtgaagctttttgtagtaaaagaatagtctacattttatgtatatgagactggttcaaaaactctggtagccacacaaagaagtattgcacagctgtaaaaaaaaaaaaaaaaatgaacaaagaggccgggcgcggtggctggtgcctgtagtcccagcactttgggaggccaaagcaggtggatcacctgaggtcaagagttcgagaccagcctggccaactaaaaatacaaaaattagctgggcatggtggtaagcacctgtaatcccagctactcgggaggctgaggcaggagaatcgcttgaatccaggaggcagaggttgcagtgagaggagatcatgccattgctctccagcctgggctacagagcaagactccgtctcgaaaaaaaaaaaaaaaaaagaacaaagaagctctttatgcactgacatgtatcaaagttcgagatacattgtttaaaaagtacagatcaacaatatgtaatgcttgccaccatcactatttaaaaagaagttagggtaggggaatacatgtacatatgtgtccttgtatgtgcataggctatctctggaaagatacaccagggatatgtgagaatggttgtccactgaggaggagaactgaaggagactggttttgaactgttatatttatttactttgtatctttttgtaaaagaaagcaaatttgaagccctttctccaacctcattttctcccctctctccccagatgtaaccactattcctgaatttggtgtttattttcttcttgaatgtttttaaacatagtacacattgctacatatataatacatattacaacatatggatgtatccataatatatcacattggtgtgcatgctgtacttttcattctgcaatgtgctttttcactcaaggttgtttaaaatatttacccatgttgggccgggcgcagtcgctcatgcctgtaatcccagcactttgggaggcctaggcgggtggatcagctgaggtcaagagtttgagacaagcctcaccaacatggtgaaaccccatctctactaaagctacaaaaattaactgggcgtggtcacgcacgcctgtaatcccagctacttaggaggctgaggcaggagaatagcttgaacctgggaggcggaggttgcagtgagccaagactgcgccactgcactccagcctaggtgacagagcaagaccctgtctcaaaaaatatatacgtgtatatggccgggcacggtggctcatgcctgtaatcccagcactttgggaggccaaggcgggcggatcacctgaggtcaggggttcgggacaagcctgaccaacatggagaaaccccatctctactaaaaatgcaaaattagccaggtttggtggcacatgcctgtaatcccagctacttgggaggctgagacaggagaatcgcttgaacccgggaggcggaggttgcggttagccgagatcgcgccattgcactccagcctgggcaacaaaagcgaaaccccatctcaaaaaaaaaaagaaaaaaatatatataatatatatgtatctatatatattttatatatatctttacccatgttgatatatgtagctcttatccatccatttaaatcactgcatagtattccgttgctttaatatgctccagctgatccattcctctgccgatggatggtgaggttagttcctagttttccagtcagtgcaccagttcacattcttaggtggtccccttgcccaccatgggaaagttcctctagatcagtgagcatcagacatttttgccacatactcttagcagtaaaaatattctcagcatgtacacctaatgcactaatatgtagttatttatgaattatttgtgtgaactgctatatcaaattagtatgtccatcataaaacatacaaaaagagaactacaaaaaggagaaaatcgttaaaaaatgaagtaggccgggcgtgatggctcacacctgtaatcccaacactttgagaggccgaggtgggtggatcacttgaggtcaggggttcaagaccagcctggccaacatggtgaaaccgggtctgtactaaaaatacaaaaattagccgagcaatggtggtgggcatctgtaatcccagctactcgggagtctgaggcaaaagaatcgcttgaacccggggagcggaggttgcagtgagccaagattgaaccactgcactccaggcctaggcgacagagcaagactccgtctgaaaaaaaaaaaaaaagaaagaagtacataatataaatatttattatttgtagtataccaaaagtccttagtaaaaataatgtagttgaagatgtttcattaccacccccacttctttatttatttttatttttaattgtggtaaaatatgtaatttggcattttaatctttttttttttttttttttttggtagagacaggatttcaccatgttgaccaggctgatctcgatctcctggcctcaagcaatccgtccacctcagccccccaaagtgctgggattacaggcataagagattgcacccggacccatcttttttttttttttttttttttgagacggagtcttactctgtcgcccaggctggagtgcagtggcgtgatctcggctcactgcaagctccgcctcccaggttcacgccattctcctgcctcagcctccggagtaactgggactacaggcgcccgccaccgcgcccggctaatttttttttttgtatttttagtagagacggggtttcatcgtgttagccaggatggtctcgatctcctgacctcatgatccgcccgcctcggcctcccaaagtgctgggattacaggcgtgagccaccgcgcccagccaacccggacccatcttaacatccaactatataccaatttatccacctcggacccccaaactgctgggattacaggcataagggactgcacccggccccatcttaaccctttttaagtttaccgtttagtagtgttaagtattcattaccttttttttgagacggagttttgctcttgttgcccatcctggagtgcaatagcgtgaccttggctcactgcaaactctgcctcccgggttcaagcgattctcctgcctcagcctcctgagtagctgggattacaggcatgcaccactacgccaggctaattttgtatttttagtagagacggggtttctccatgtttgtcaggctgctcttgaactcctgatctcaggtgatccgactgcctcagcttcccaaagtgctgggatgacaggcgtgagccaccacacccagctgtattcattactttaaaacttttggtttaacaatgtgtattacagctatttaagttctattcatttcaattcttggttttcatgactgtcttgactgcagtcttgacccctatgatggactcttaggggtttattatagtactctatctactttcatgaatattttttatgctccatttctctaaaatctgcatcattgtgcttaacaaaaccagtcattttaaaatcccatctaccaaggcttttattgaaattggactcatttctatcttccctgatttttttttttttaatttttgtgagtaccaagtaggtatatatatttctgggatacatgagatgttttgctacggaatcttccctgatgtttatcagttgttttttccaaactaatcagaaggcattgtatttttttctttttttttttttgagatggagtttcactcttgttgcccaggctggagtgcaatggcacaatctcagctcactgtaacctccacctcctgggttcaagcgattctcctgcctcagcctcccaagtagctgggattacaggcatgtgccaccacgcctggctaattttgtatttttaataaagacgaggtttctccatgttggtcaggctggtctcaaactcctgacctcaggtgatccgcccacctcggcctcccaaagtgctggaattacaggcgggagccatcatgcctggcctgttttcttttcttttgagaaagggtcttgccctgtcacccaggctggagtgcagtggcaggatcatagatcactgcagcattgaactcctgggctcaagacatcctcccacctcagccttctgagtagccaggactatatgtgcatgccaccatgcccggctagttttcttttcttttttttcctgagacagagtctcactctgtcacccaggctggagtgcagtggcgtgatcttggctcactgcaccctcccaggttcaagtgattctccctgcctcagcttctcaggtagctgagattacaggtgcctaccaccacgcccagctgattttttttttttttttgagatggagtcttgctcttgttgcccaggctggagtgcagtggcacaatcttggctcattgcaacctctacctcctggattcaagcaattctcctgcctcagcctcccaagtagctgggattaaagatgcatgccaccacgttgggctaatttttgtgtttttagtagaaacagggtttcaccatgttggccaggctggtctggaactcctgacctcatgatctgcccacctcagcctcccaaagtgttaggattagaggcgtgagccaccacgcccggcctgattttgtatttttagtagagatggggtttcaccatgttggccaggctggtcttgaactcctgacctcaggtgatccgcccacttcggcctcccagagtactgggattacgggcgtgagccactgtgcccagcctgccagctagtttttttagatttttttttttttttttaagagagacagaatctccctgtgtttcccaggctggtctcgaactcctggcctcaggagatcctcccactttggactcccaaaatgctgggattacaggtatgagccaccacacccagcattgttttttcttcttttttagatggagtctcgctctgtcacccaggttggagtgcagtggtgcaattttggctcactgcaacctctgcctcccagcttcaagcgattctcctgcctcagcctcccgaatagctgggactacaggcgcgtgccaccacacccggctaagtttttgtatttttagtagagatggcgtttcaccatgttggccaggatggtctcgatcttctgacctcatgatccgcccatcttggcctcccaaagtcctaggattacaggcatgacccaccgcacccagccacctttttaaaaaatatatatacagagatagggtctcactctttcacccaagctggaatgcagtggcacaatcacagctcacagcagcccaaagtcctgggctcaagggatcctcccatcttagcctcccaagtaggtaggaatacaggcgcccaccaccggatctagccaattttttttttttttttttttgagacagggtctcactctgctgcccagactggagtgcagtggggcaatctcagctcagtgcagcatcaacctcctgggctcaagcaatcctcccacctcagcccattttttttttaagtattttatagtgacagagtgtcactgtgttgttgcccaggctggtctcaaactgctggcctcaagtgatccacctgcctcagcctcccaaagtgctgggattgcgggtatgagccaccttttcctgcccaaaacccattgagacagttgcttggaagatttttaaatggtttagcaaattctgttttatagatttttttttctttttatggagacagagacccactctgtagcccaggctggagtacagtgacacaatctcagcttactgccaagtgattcttgtgcctcagccttctgagtagttgggattacaggcaagcaccaccgcccccagctaattattgtatttttagtagagatggggtttcgccatgttggccaggctggtcttgaactcctggcctcaaatgatccaccagctttggcctccagaagtgctgggattacaggtgtgagtcaccgcgcccagcctagatttttaaatgtgagaatcagatgttttgttttatttatttatttatttatttatttatttatttatttagacagagtctcactctatcacccaggctggagtgcagtggcacgatctcggctcattgcaagctccacctcccaggtgcacaccattctcctgcctcagcctcccgggtagctgggactacaggcgcccgccaccatgcccggctaactttttgtatttttagtagagacagggtttcaccgtgttagccaggatggtctcgatctcctgagctcgtgatccacccacctcggctccccaaagtgctgggattataggcatgagccgccgcacccggcccgttttgttttatttttaaagatggttcacatacctttattagaaacaaagtcattaaagatcaaaacatttccaaacatgtgtcttcaaaatatgctctttatggcatgagcttctcttgattagtggtgatttttttcaccccttggccagctgactccttctcaacactggattctcaccgaaccataagagtttgtacctgtaatactcatttgtgtgtgaagcactaggattatttgtaactgtaatcttgctcattcacaagaatatggttaagccccttgtccactttggagagttaggaaaaattatatctagatagcataatctgtaaatccacttatctggacatacgtaaactgtatagagactaggtgtggtctctcacctgtgatcccaacactgggaggccaaggcaggaggatcgattgaggccaggagttcaagaccagcctgggcaacacagcaaaactattagtaaataaataaaataatgataataataaaaactgtgtagaacactgaaaagcaaacatggcgcaggacactgaaagaaaacacacaacccctccaaatacgaagctcctgaccccttacccagttacctcacctgtcttacataacccaagatgtctaacagatgcccagtgtcaatccacttactaaatattaataaagcttacttgtttttcttcttttagataatataatacacttaaattataatgtgttttttcagcacctctatgatcaattttttttttttttttttagatggagtcttgctctgtcacccaggctggagtgcagtggtgcaatctcggctcactgcaacctctgcctcccggattcaagcgattctcctgcctcagcctcctgagtagttgggatgacaggcgcccaccaccatgcccggctaatttttgcattttcagttgagacagggtttcgccatgttggtcaggctggtctcgaactgctgacctcaggtgatctgcccacctcaacctcccaaagtgctgggattacaggcgtaagccactgcacgcagctctttttttttttttttttttttttttttgagacagagtctcactttcttatccacgctgaagtgcagtggtataatcatccctcattgcagcctccacctcctgggctcaactgatcctcccacctcaggctcctgagtagctaggaccacaggcatgcaccaccacacccagctaatttttttttttaatttttagtagagatgaagtgtcactatgttgctcagactggtctcaaactcctgggctgaagcgattcacctgcctcagcctcccaaagtgctgagattaaaggtgtgagtccccatgcctgacctttgtaatcatcttgtacctgaggcacacctttcttttttggccggggcgggggggtggggggcggagagtcttgctctgtcacccaggctggagtgcagtggggccatctcagctcactgccacttctgcctccttggttcaaacaattctgctgcctcagtatcccaagtacctgggattacaggcacacaccaccatgcctggctaatttttatattttttaagtagagatggggtttcatcctgttggccaggctggtcttgaactcctgaccccaagtgatccgcccaccttggcctcccaaagtgctgagattacaggcatgagccaccatgcctggccaaggcacacctttctttggagaccaccggcccaggataaacctagaagagtgttagactgaagggcaggtaccttattgggtactaaattgctctcccaaggtttgccccagttttataccccacccttttctttgcatttttactagaatttggttttaatacacattaatttttgcagatcaaaagttatgaagtggcatttaattattgttaaattggtattttcctaattattagtgagtcgtagcatgctttatgtttatcagcccttaaaatgtctcatgtttgtattgcccgtatttttcttttgtgttatttgtcttttccacattgatttttaagaatctactttttcttttccatttcattaatttctatcctttgctatttctgactgtctacagcctttgggctcactgttttgttcatttttctgacttctcaagttgaacacttagctaattcattttcaattattcttattttctctttcttacttccttattttctttttctttctttctttttttttttttttctttttaagcaacagagtcttgctgtgttgcccaggctggtctcgaactcctggtctcaaacagtctgcctgcctcggcctcccaaagtgctggggttacaggcataagctaccactcctggcctaaatttaacttttagatttgggggtacatgtgcaagtttgtcacaagggtatattgtgcaatgctgcaatttgggcttgtcggtggggggtgggcagggtgggctggggcagagtctccctctgttgcccagactggactgcagtggggcaatcacagctcactgcagccttgacctcctgggctcaagcgaccctctcacctcagcctctccaatagctgggaccacaggtgcatacctaatgctcagctaattttttattttatttattgtagagaaaggttctccctatgttgcccaggctggtctcaaacccctgggctcaagtgatcctcgggccttggtgtcccaagtgttgggattacaggcatcagccaccacacctggcctgggcttcgagtgatcccatcacccagatagtgaacatattacccaccttcctctctccagccttccctccttttggagtccccagtgtctattgttctcatctttatgtccatgtgtatccagggtttagatcccacttaaaagtgagaacatgcaatatttggttttctgtttctgtgctaatttgcttaggagaatggcctccagctacactcacattgctacaaaagacatgatgttttttttttttttgagattgagttttgctcttgctgcccaggctggagtgcaatggcaagatctcagctcaccgcaacctctgacttccaggttcaagctattctcctgcctcaccctcccgagtagatgggattacaggcatgcgccaccacacccggctaattttgtatttttagtagagatggggtttctccatgttggtcaggctggtctcgaacttccaacctcaagtgatccgcccacttcggcctcccaaagtactgggattacaggcgtgagccactgcccccagcaatttcattattttttatggctgtatagtatcccatggtgtatatgtaccacatttactttatccaatccaccattcacggggtacctaggttgtttctatgtctttgctactgtgaatagtgtggtaataaacatagtgcaggtgtccttttggtagaatggtttattttcctttgggtatataccaagtaatgggattgctgggtcacatgatagttctatttttagttctttgagaaatcacactgctttccacaggggctgaactaatttacattctcaccaacagtatataagcattaccttttctccatagactggccaacatttattatcttttggctttttaatagtagccattctgactggtatgagatggtatctcattgtggttttaatttacatttctctgatgatcaatgatattaagcattttttcatgtttgttgccacttgtatgtctttttttaagatatgtctgctcatgtttttgcctttttttttttttttttttttgagacaaggtcttggtctgtcgttcaggctggagtgcagtggcatgatcttggctcactgcagacttgaccttctggcccaggtgatcctcctacctcagcctcccaagtagctggggctgcaggcatatgccaccaggcctagctaatttaaaaaaatttttatatagatgggcctccctattttgcccaggctgaccttgaactcctgagctcaagtaaagcctcctaccttggcctcccaaagtgttgagattacaggcatgagcccctgcatctggcctttgcccactttttaattaggtttttttgttgtcgttgatttatttaagttccttatagattctggatattagtcctttgtcagatgcatagtttgcaaatatgttctcccattctgtaggttgtttacttcattgatagtttcttttgctgtgctttggaagctctttagtttaattaggtgccagttgtcaattttttttttttttgtcgtaattgcttttgaggactcaggctgatatctagacagtatttcctaggttttgttccagaatttttagtttgatgtcttacatttaagtctttcatccaccttgagttaatttttgtatatggtaagaggtaggggtccagtttcattcttctgcatatggttaaccagttttcccagcatcatttattgaacagggagtcctttccccattactcataggtgtacagctttatttttgggttctttattctgttccattggtctatgtgtctatttttatgccactaccatgctgttttggttactgtagccttgtttagtttgaagtcaggtaatgtaatgcctctggctttgttcttttagcttaggattgctttggcgattcaggctctttttttcattctatatgcattttagaatagtttttttttctgattctgtgaaaaattacattggtaatttgataggaatagcactgaatctgtagattgttttgggcagtatggacattctaatgatattgactcttccaatccatgatcatggaatgtttttctattcgtttgtgtcttttattatttctttcagcagcagtgttttatagttcttgtagagatctttcacctccttggtgagatgtattcctagggattgttttgtgtgtgtggctcttttttttttaatgagacagagtctcgttctgttgcccaggctggagtgcagtggggtgatctcgtcttactgcaagctctgcctcccgggttcatgccattctcctgcctcagcctcccaagtaactgggactacaggcaccagccaccacacctggctaattttttgtatttttagtagagacggggtttcaccatgttagccaggatggtctcgatctcctgacctcgtgatctgcccgcctcggcctcccaaagtactgggattacaggtgtgagccaccatgcccggctggcgctttttttttttttttttttgacagagtctcgtcacccaggctggaatgcagtggtgtgagcttggctcactgcaatcttcgcctcctgggctcaagtgatccttgtgcctcagccacctgaatagctgggattacagttgcacaccatcactccaggctaatttttgtatttttagtggagatggggtttcaccatgttggccaggctggtctcgaactcctggcctcaagtgatccaccctcctcagcctcccaaagtgctgggattacaggtgtgagccaacatgcccagcctgtgtgtgtggctgttgtacatgagatcacattcttgatttggctctcagcttgaacgttattggtgtatagaaatgctactgatttttgtgtgttgacttttttttaatcctaaaattttattaaagtaatttattgggtctaggagccttttggtggagtcctcatggttttctagctatagaatcatatcatcagtaagcagagataatttgattttctctttacctatttggatgccttttgtttctttttcttgctgattgctctggctaggattccctaaatacatttatattttaaagtattttcattttttggagttgcatagtgttgcacagtatgactacaccataatttatttaacctactgcccgttgttaatcaatattttcgttgcttttgatcttttggtattgcaaacaatgctgaggcagatacctttattatacaaattctgtcacacatgtgaaaaaagaacatgctgaaccatcttgcctcttaaagtttctgcttggaagtgatgtcacttttttcttttttcatgagccaaagcaagtcatatggccaaggcttcgttcgttcatcagggctgagatgtataagcttcctcagggaggagtcccactggaagagataccaagtttatgtactgtatatacctctaccagtgtttaaaaaatatcaccctgggccaggcgcggtggctcacacctgtaatctcagcactttgggaggccgaggcggatgaatcacctgaggtcaggagttcgagaccagcctggccaacctggtgaaaccccgactctactaaaatacaaaaattagccgggcatggtggcaggcacctgtaatcccagctactcgggaggctgaggcaggagaatggcctgaacccgggaggcaaaggttgcagtgagccaagattgcgccactgcactccagcctgggcgacagagcgagactccctctcaataaaaaaataaataaatataaaaactatcactctggttgctgaatggagaatggattatactggggagagataggaagctactcgggagtagaagtgaagaattgaccgcagtactttaggcaagaaatgatagcagcttgaactagggtggtggtggtctgattccagatgtactttggaggcagagttagtaggatttttttcttggagtggggatgggcacaagggaaagtactgaaagacaacttctaggtttttggtttgagcaactgggtgaatgattgtgacatttgagtaaacagtaacattttactgagaggggaagacctggggggagaacaggtggttttttgacaggggcagcgaaacaaatgttctgttttgaatgtgttcagcctgaggtgcctattagacatccaaattgaaatagccagtaggcacttgaatatgtgagtctggagatcagacaggtcagagctacagaaaatctgaaggtgtggcagagctgaattgtaaagctgtggagctggatgagatctcctagggagataagggagagggataagggctaaagcgttggcatactccaaaatatataggtgaacagtggctttggatccagcaaaggggactgaggaggaaccattgagatagggaaaaaaacggtagagtgctgagtcatggaagcaaaaagaagaaagtatttcaaagaaggaatagtccatctataagttggatatgataaggatagtatttcagactgtggaaatcacagttgacctggataagtacagtttttgtggggaggtccccagctctccactgaatgatctcttattagatcaaatttgatctctaattagcagtctaattagatgggttgaagaaaagatgggaagtgagggataaagatacgtcttttgagaagttttgttgggcaggtaataattgaagaacgggagggggacaaaaatgtgaagatgaaatgatgtgtaagtgaaatctttatgtaaactgcaaatgctctgcaagtgttaggcttattttgttatttagtattcaaacttctaggaatttcaatgcagctcagtgtgaagaatcactaaaaagcgaccactagtcctcaacttgagggccattaaggggcaaagccgtctagccagtgaagagccaagaaatgaagagacggtttgagaagacgtaggcggtgggggaacggaaagaggaatcgcgaaactaatattgtccttccaaggacaccgtagggcggatctcgcagctacggcgttcttttaggggtggagccggcaggaaatttaaactgaagccgcggccgaaaacgccaagagattgatgctgtagctgccctgagataaccaggactgtggaatcgggaagagctcatggagctcgcgaatgtaatacggaggcctctgaggaaggagtacggaggccgagaaggagccggcatttgatgagcgaaccgggaaagggtacggatgccgggaaggggagaaagaaaggcggaaggggtcgttaatagctgaggcgaggtgcggagtcgtggagggggcttaggaagtgaccagcgggtaggtgccgaagctgaggagggtataggggccgggaaggagccacaggagttgaggggaccgaggaatgaaggtggcagaggaacgtaggggacaacagcctggagggatgtatggagattgagatggacaggaggtggccaagaggtcacggccgttgactgaacggagtctgaaaggaggcggagggcatgaggggcaagagcctggcgggagtcgcgggatgtaggtcggaatggagttgagtcttgctgttcccaggagtcgcgtttctgtgcgcgttttgggagacagtagtgggcgggaggcatggaagttccaagggttggtgaagatggttgagttgctgttatgtcctttctcaggagacgattgcctcgagctggagagttccatggctgagagtaggctccgggccccggacctaggtgggtaacaggacagaactagggacgtgaggtgaaaattgccccagggtctcttggagaagaccgaaaaatgttccccctgttggagttttcgatcactcagtgtttttatgtacttatttattcattttatttattgggatggggtcttgctgtgttggccaagctggtctcaaactcctggcctcaagcagttctcctgcctaggcctcccaaaatgctgggattacaggtgtgagccacttcaccaggcccacttagtggttttatgtgtgtgtgtgtatggacgcagcatcatagaccgttttgggattcatgataaaggtcaagtaagagtcatattatgaacaagattaacagacagatgtggagtcaggatagagtgacttattaaatatataaattaatacattcatagttgtttacaataaaatccttaagttaaacactgctacctaattaggtaagtattttagcacatggcacttccctccgtactgcccctttagttaatatcatctagttggccgggcgcggctgctcacgcctgtaatcccagcactttgggaggccaaggcgggcggatcacgaggtcaggagattgagaccatcctggctaacacagtgaaaccccatctctactaaaaatacaaaaaattaggcgggcgtggtgaggcgtgcctgtagtcccagctactcaggaggctgaggcaggaaaattgattgaacccaggaggcggaggttgcagcgagccgagattgcgccactgcactccaacctgggcgaccgagcgagactccgtctcaaaaaaaagaaaaaaaaaataccgtctacttttacttctggattgttaacagatatgccatcggcttgttgccttttaaacagtaatccacttcatttactgagttattcattcttcccatctcttgttggttttttttcccccttctgtttctctggagaacttcaagagtgttttcaaaaggaggctttgtgtgataaactaagaatatatttatttcagccttgtagtaaaatttaagtcaattttttttccttcaacacattgaaaaattacagtattttctccttgttttcttcagcatttcttttttattcttgctgctttgtaagtgacctccttttctcattagatgttttagattatgtgaacctatggattatattgatgaaagaaaaaaatgttttattttatttattttgaggtcttgcacccaggctggagtgcagtggagcaatcatggctcactgcaggtttggcctcaccgggatcaagtgatcctcccacctcagactcccaggtagctgggactgcaggcactcaacaccacgcccagctaatttttttttgttgtttgttttgtagagacgaggttttgccatgttgcccaggccggtcttcaactcctgggctcaagcgatcaccctcctcagcttcccaaagtgttgggattacaggagtgagccactgcacccagcccaatattttagattatacatttttatatttgttcttaaaatttactataagatgataatgtgtggattttagagggtttttattttcgtttttattccagtttgatttttttttttttttttttttttttttgagacagagtctcgctttgtcgcccaggctggagtgcagtggcaccatctcggctcactgcaacctctgcctccagaattcaagcaattcttttgcctcagtctcctgagtagctgggattacaggagcacgccaccatgcccggctaatttttgtattttcactagagacagggttccaccatgttggtcaggctagtcttgaactcccgacctcatgatccacctgcttcagcctcccaaaatactgggattataggcgtgagccaccacacctggcctccagattgattctttaaatttttttaaattattattttattttagagacaagaacttgctctgttacccaggctagagtacagtggcacaatcatagctcactgcagcctcaaagccctgggtgcaagcaattctcctgcctcagtctcccaatctcctgcctcagtctcccaagtagctatgtcttcaggtgcatgtctccacacctggcttcctgtttgattcttgacatagcttaaaaggcaggccatgtgtggtggctcacacttgtaatcccagcactttgggaggccaaggcaggcggatcacctgagatcaggagttcaagaccagcctgggcaacgtggtgaaaccctgtctctactaaaaatacaaaaaacagagccgggcgtggtagctgacacctgtaatcccagcactttgggaggccgaggcagggggatcacgaggtcaggagattgagaccatggtgaaaccccatctctactaaaaatacaaaaaattagccgggcgtggtggcaggcacctgtagtcccagctactcgggaggctgaggcaggagaatggcgtgaacccgggaggcggagcttgcagtgagcaaaattgcaccactgcactccagcctgggcgacagagcaagactctgtctcaaaaaaaaaaaaaattagctggcgtggtggcaggctcctataatcccagctacttgggaggctgaagcaggagaattgcttgaacccaggaggtggaggttgcagtgagccgagactgtgccattgcactccagcctgggcaacaagaatgaaactccatctcaaaaaagaaaaaaaaaaaaaagccaaagtttctcacaaaaaacaggaggcatgagagttaatcccctttcaggctgtctgattcccacttcctaagaaacagccatttacagcttttaactatttcttctagaagctaccaccttatttctgtaataatatgctcatactgttttaattgttttccattttgaattatgtcttctttttttttttttttttttttttgagacggtctcactctcatcaggctggagtgcagtggcacaatcatctcggctcactgcaacctctgcctcctgggttcaagcgattctcctgcctcagcctcccaagtagctgggactacaggcacgtgccaccatgactggctaattttttgtctttttagtagagatggggtttcactgtgttagctaggatggtcttgatctcctggtctcgtgatccacccgtctcagactcccaaagtgctgggattacaggcatgagccaccacgcccagccaaattttttgtatttttagtagagatggggttttaccatgttagccaggatggtctcgattgcctgacctcacgatctgccctcctcagcctcccaaagtgctgggattacaggtgtgagccaccacacccggcctgtcttcttttttttttatagagatggggtctcactgtgttgcccaggctggtcttgaactcttgggctcaagtgatctgcccacctcggcctcccaaagtgatggaattacaggcgtgagccaccatgcccagtcaattttgaattatatctattgactgtcttctatggacaataaagattttttctgtcctaccacttctctgcaccacacacaaacgcacatgcatttcccacctttccttttatctccccagtatatatgtagtaattttgatttagtcatttgtattgactttttttttttttttttttttttgagacagagtcttgctctgtcgcccaggctggagtgcagtggcgtgatctgggctcactacaagctccgcctcccgggttcatgccattcttctgcctcagcctctggagtcgctgggactacaggcacccacgaccaggcccggctaattttttggttttttttagtagagatggggtttcactgtgttagcctgtatggtcttcatctcctgacctcgtgatccacctgcctccgcctcccaaagtgctgggattacaggtgtgagccaccacgccccgccgacattattttcattatgtaaacattattcggccgggcgcggtggctcatacctgtaatcccagcactttgggaggctgaggcaggtggattacctgaggttaggagtttgagaccagcctggccaacatggtgaaaccctgtctctactaaaaatacaaaaatcagtaggatgtcgtgcacgcttgtaatcccagctacttgggagactgaggcaggagaatcacttgaacccgggaggcagaggtgtagtgagccgagatcatgccgctgcactccagcttgggcgacagagaaagattccgtctcaaaaaaacaaacaaacaaaacattattcatcactgagctatataataagctaggagattttctttgtttttttatgtatggatcactaattcaggtccaaactcttcaccagagtatgggccttctctcaatactttcaagctcatcagaggatctgtcaatttgtcttggagacatagcgttttagtactccagtctggcctggctgtgtactaggcctattgcactgatttcatcctccgatctcccctcgttattctgtggaattctttttgcctctttcctgtgttggatctcctgtattttaaattctatattttttacaccatggaatactacttagccataaaaaggaacaaaataagttctgcagcaacttggatggagctggaggccattactgtaagtgaagtaactcaggaatggaaaaccaaataccatttagttttcacttgtaagtgggagctaagctgtgaggatgcaaagacatgcaaagtcatataatggactttggggatttgatgagggggaaggttaggagaggggtgagggataaaagattacatattgggtacagtgtacattgcttgggtgacaggtgcactaaaatctcataattcactgtagaactcatccaggtaaccaaaaactacctgtaccccagaagctattgaaataaataatacttttgaaaatgaagtataagtttggggagccccacagcaatatttggctttcctgaaattctgtataaatttagacaagactatctcaacatttatccatctatatgccgatgtggtaacagtctctgtatgttttttgtgtttgtttttaactttcactaaacaagtaagaggtatccttcattccatttctaccccttactaacagtatgatcttgggcatacaagatttctctgtgcctcagtttcctgtaactgtaattattataactgtaaaacaggtataataattttatcttctttatagacctgttgagaatgtattgtgcatagcgatatatatttgctatttctattgctattattgtcaaaaattattaaattttgatttttttgtagaagtggagtctcactttgttgcccaggctggtcttgaagtcctgagctcaagtgatcctcccaccttgatctcccaaagtgctgggattacagatgtgagctaccatgcccagcttattattattattttttttaatgggcagcccccaaaccagaataggttcagagaggctcccataggaaggcttttacattagctggtctccaatattggctacaatgtaagtcaaatcctgtctttctcttcagtattctgaaattccatgacagtgtgtcttgatgtgggacttttttcatttatggagcaggtacctttcaatctgtaacatcattttctttagttctgggaaatttttagcattatttctataatatttctcccttctattttctcttttctctttctggaacttttattgtttggatattagatctcatagattcttcctttgattttcttgtggatttttgtttgtttgtttttgagacggagttttgctcttgttgcccaggctggaatgcaatggtgcaatctcagctcactgcaacctctgactcccaagttcaagtgattctccagtctcagcctcctaagtagctgggattacaggcacccgccacctggctaattttttgtatttttagtagaaatggggtttcaccatgttagccaggctggtctcaaactcctgacctcaggtgatccacccatctcagcctcccaaagtgctgggattacaggtgtgagccaccacacccggccagttttcttgtttttctctcccattttgcatctgtctttcattctgttctctagaaaatttccacaacttaatctccaattttcgttgaatttttaatttctataacatttataaatttccaagagctttttcttttctgtgtgtttcttttcttacagtgtcttgttgtgcttaatggatataatgtattccctttcctctccctggttgttaattgtactgtttttgtttctttttagttttcttctgcttcctacattatgtctatttcctcttcttttttctgtttgttagcctaatttctttctttctttcttttttttttttttttttttttttttttgaggcagagtcttgctctgtctcccaggctggagtgcaatggcgcgatctcagctcaatgcaacctccccctcccaggttcaagcaattctcttgcctcagcttcccaagtagctaggaccacaggtgcatgccaccacacctggctaattgtttgtatttttggtagagacggggtttcaccatgttggccaggctggtcttaaactcccgatctgaggtaatccacccgcctcggcctcccaaagtgctgggattacaaacgtgagccaccacacccagtctagcctaatttcttgttagaaacttcctttaaatgtctgatgatctttgtttacctattcatatttaagagtgaggagaaggggttgtcaacttgatagacttcattgtaagctgggacctggcaattttgtgggggagggacctcagttgtcactagtttgtatgtttttgtcttgagctagtcagttcgctagagaagagtcctccaaacctctctctggtaagtataagcttgtcagcattctgggagctcactggggcaacagatctgtaggtcttactgttcagtatacagatattcttttgatcccctatgttttcactggggctttatctttgctttcacctgtgcccaatgttcctctagtccagggattttttcagccccaagactattgacattttgagccaagtaattctttgttttctgaggttgtcctgtgctttgtaagatactaagtggcatccctggcctccacccgctagatgccaggagcacacccacttcccagttgtgccagccaaaaacatttccagaggttgccaagtatcccctgaggggaaaaatctccccagttaagaaccacggctctagtcttctgctggggtgggagagggttctgagagtctattccttttaaagtctttcaaataattggtattttagcctactgtttcattctagcattctactctgtatggtccctctgattgggcctttcagctctaatcagcttgcttcttgttggcttaggatttagccttctcttatctcctgtctgtttttcactcacccatctaatttccagcgtccaacattttgtagcatctcttgcctgttgtcttcttgccagtttctttatctatttttattctttttctgtcactttagtgagatttggagagagaacagaagttcttgtattcatcttccacatttatgcagaagcctggatcattatttcttcaaatattttcttctctccattgtttttccccctttgcaactcttctggtgttgttgacatttctatccctatcctctgcatttcttaaattctctgatgtccatttatttatctctttgtgataccttctgaaagagttactcaacctaatttaccagctcacactgttctatttagctcatctattgatgtggatagatcttttcgtttttaattttaaaataatttcacagttataaaaaaatttcaaaaatagtcaaaggttcctactctttacccagcttccccaaatattaacatctatgtaataatagtacaattaaaaaaatccaggctgggcgtggtggctcacgcctgtaatcccagcactttgggaggccaaggcaggggaatcatttgaagctaggatttcgagaccagcctggccaacatggtgaaaccctgtctctactaaaaatacaaaaaaattagctggatgtagtggcaggcacctgtaatcccagctacttggaaggctgaggcaggagaatcacttgaatccgggaggcagaggttggactgagccgagatcgtgccactgcactctagcctgggtacaaagcaagacctggtctcaaaaaaaaaaaaaaaaaatccagggggctaggcgtgttggctcatgcttgtaatcccagcactttgggaggctgaggtgagaagatcacttgagcccaggagttcaagaccagaatgggcaacatagtgagatcttgtctctacagaaaatcaaaaaaattcgccaggtatggtggtgcgtgacatggtggtgcatgtgatcccagctactcaggaggctcagggggaggatcccttgagcccaggaggtcaaggctgcagtgagccatgatcacaccactgcactctagcctgagtgacagagtgagatcctgtctcaaaaaaaagaaagaaaagaaaatccggaaattaatgttgatattattaactaatctatagatctcattcacattttaccaattatcccccaatgttcttgtcctggtttaagattacatgttgcagctgggcacgatggctcatgcctgtaatcccagcactttgggaggccgaggcgggcggatcatgagttcaagagatcaagaccatcctggccaacatggctgtctctactaaaaatacaaaaattagctgggcatggtggtgtgcgcctgtagtcccagctacttgggaggctgaggcaggagaatcgcttgaacctgggaggcagaggttgcagtgagccgagatcgcaccactgcactccagcctggacgacagagcaagactctatctcaaaaaaaaaaaaaaaaaggttacatattgcctttaattatatctcgttagtctcctcctgagaggaggtcctcattctttctttgtctttgatgacctcagtacttttgaagtcacctctaaatttgggtttgtttggtacgtccacatgattgaattcagctaaagcatttttggcacagaagtgatgttatcccctctccagtatgttatcaggaggcacatgatgaagataagataaatctcattaacttcgatcccttgattaaaagtggtgtctgctaggtttttccactgaaaagttactgttttaccttctgtaattaataactatcttacaggaagatactttgagactgtgcaaatactgaaatttaaattgtttttcttttagagctggctttggtgccgcatgcctgtaatcccagctactcgaggctcaggcagaagaatcacttcaacccgggagacagaggttgtagtgagccaagatcgcgccactgcactccagcctgggtgacagagtgagactccgtctcaaaataaataaatttttttttttttgagacggagtcttgttctgttgccagactagagtgcagtggcgcgatcttggctcactgaaacctccaactccctggcttaagcaattctcctgcctcagcctcccaagtagctgggattacaggcacgtgccaccatgcccagctaatttttgtatttttagtagagacagggtttcaccatgttggccaggatgctcttgatctcctgacctcattgtccatccgcctcggcctcccaaagtgctaggattacaagcatgagccaccacgcctgtcctattttttttttcttaacagcttttttgagttatagttcacacaccacacaattcatccatataaagcgtacaattcagtgacttagtatgttcacagaattgggcaaccatcaccacaatcaatttagagcacttttctcactccaaaaaagaatacccattagcagccactcacaaatttctcctgactccccagccctagtcatctgctaatgtactttctgtttctataaatttgcctcttctggacatttcatataaatagagtcataaaatgtgtagtcttttgtgactgatttctttcacttagcataatgcttttgcagtttatccatgtggtgccatgtgtcagtacatcattcctttttattgttgagtagtgttccattatatggatataccacattttgtttatccattcatcaaatggacatatgagtttccactttttttttaagagacacaaacaaaatgttattaggttcttaagaaattcagaacaccaatttgtgaggataaattccattcgttagggcagacacagatcacaggtagccctggagctgaggaaagctttgatttttttctaaaacatgtgagtccacagctttctgataagtcttgcgctgctctgtaatctatttctctttttctgtgtcaaaggtctcaccttcctggtgtttaggcttccacaccttcttaaagtaagcaccagtaagacgttttgcaatttttacattgctgctaccaattttggttgaggtagcaatgacaaatttctggtgtgttcttcgtagaggaacttgattgaggaccagaggtccagtcccaagaccagctgcttcaggaaaaccaccctcgcctctgtggcgcccagtggtgatgatcagaatcgtcctggaggtgatgctggatcgcagttttctcacatgctgactgaagggtttcttttgccatggctcaacagctttagaggcacatcttcagtagggtaatatctaggcattttgtgaagtttaaccacctgggtaccactgttcttgtcaacaccaactggttttgtaacagttgcaagaaacttctttttcttttcaaccttggatttagcagctgagtacttcttcctggacgtggtctttctggaatacatagcagatcgggaatatctgcaattcctctgacaaggacaggattgcagctgcaatggggcttccctgtcttagacgttttagccttgaggttgccccttttcaccttgccaccaacatcagctttcttggccttaggtttcttctctttagtatctggcttctcagctttctcacccatcatcttgcaagatgggaaagactccactttttggctatatgattaatattgctataagcattcatttacaagttttcatgtggctgtgttttcatttctcaaggatatacctaggagtaaaattgctgggtcatacggtaactctgtgtttaaccttttgagaaactaacacatggttttccaatgtgactgcacgattccacattccctccagaagtatatgagggttccagtttctcatatcctcaccaacacttgctattatctggcttttttttttttttaagtcaatctcgcttggtttcccaggcttgaatgcagtagtgtaatcttaactcttaactcactgtaacctccacctcctgggttcaaacaattctcctgcctcagcctcccgagtagctgggattacaggcgtgaaccaccacgcccggttattttttgtatttttagtggagacggggtttcaccatgttggccaggctggtctcgaagtccttatctcaagtgatccacctgcctcagcctcccaaagtactgggatacaggtgtgaaacacagcacctggccaagattttaaaaatactatgtttttcatgtccattatctccaactaattcttccccccccctccccttttttgcgacagaatctccctctgttacccagactggagtgcagtggcatgatctcagctcactgcaacatctgtctcccaggatcatgcaattcttgtgcctcagccacccaagtagctgggattacaggtgtgtaccaccatgcccagctaatttttctatttttagtagaggcagggttttgccatgttgcccaggctggtctcgaactcctggcctcaagtaatgtgcccacctcggcttcccagagtgctgggattacaggtatgagccactgtgcccggcctaattcttttctttaactgctgttcctgctttatgttttcctgtatcctccctagcctttttgaggatatttattatacttcaatggtttttctttttcctatctggttcattattatgacagatagacaatctataccagataaagtttctttggtagtacttgctttcttcagttgcctcatgttttcttatacacaaatatccctttgggacattagccactctgattggtaacgtgctgctcgaaggaagatcaaaagcttatgccctatctcgtgtgtccctccgctgagtttagggattggaggttgcatagaagaggaaacaaccctggccaggcatggtggctcgcgcctgtaatcccagcactttgggaggccgaggcgagcagatcacctgaggtcgggagtttgtgaccagcctgaccaacatggagaaaccctgactctactaaaaatacaaaattagccaggcatggtggtgcatgcctgtaatcccagctactggggaggctgaggcaagtgaatcgcttgaacctggaagaaggaggttgcgataagccgagatcgcgccattgcactccagcctgggcaacaagagcgaaactccgtttcaaaagggaaaaaaaaaaaaggaaacgaccccactatggtgcaaagcccctggaatatgggctcattcactctccatttgcagcagcattctgtgctctccaacacacacacacactttgtcttgttgtttttcaagagctgtctttttgagttataattacctaagttaccaaatgcagaggttgggaagtaggcccattcaggagccaacaagttcactgtccccttttcctcttatctgtctcgaatacacatgcatattcgccctaagctaggcggcaacactgccatgatgttaccctgctgactctggttaggggctgggcactggcaacagggcaggcagtgactcactcagcacagctagaaagcatcctcctgcctggcacccccgtgtgaatctcggccctcttttccctagtttactattcactgcagccccccaatgtctggtttggggatctgtctaatttctttttacttaaatggcttccctagatttagattctaaggaagaagtgaagaagtcagcaagccttgtttgcttattatcttgtttggaaggttccaatttcaccacatctgagcttctgagggtaagggcattggcttcacagctgtctgtgtgtgcccagggtctagtctgtgctattatagcacacagactgagctgtcagtgagggccacctggcttcaggactctcttttcaaacttcttactttgctcctctttattgttttctaggagtttccaggtgtctaggaaaatgccagaagaactcaccaggtgccaggaagcatcccttttccggaaagtccttttacttggatctgcctgctggcaagaatctccagtttttgacgggggccattcagcaactgggtggggtaggtaacctgctcttctcctgcgatgccatgtgcctttgcaggcttagagcaggagttggatggggattatatctatggtttccaagtattttcttttttgagacagagtcttgctctataacccaggctggagtgcagtggcatgatctcagctcactgcaacctctgcctcccgggttcaagcaattctcctgcctcaacctcccaggtagctgagatgacaggcacacaccaccacgtctggctaattttttgtattttagtagagatggggtttcaccttgttggccagggtggtcttgaactcctgacctcatgatctgccaacctcggcttcccaaagtgctgggattacaggcgtgagccaccacacccagcagtttccaggtattttcagcggtctcactacatttccgaaagcaattttaaatataaaccatttttttggccaggcgcagtggctcacacctgtaatcccagcactctgggaggccaaggcaggtggattacttgacgtcaggagttagggactaactaccctggcctaaatgacaaaaccctgtctctactaaaaataatgaaaattagccaggcatcatagtgggcacctatagtcccagctgctcaggaggctaaggcaggaggattgtttggacctgggaggcggagtttgcagtaagccgagattgtaccactgcactccagcctgggagacagagtgagactctgtataaaaaaaaaaaaatgataaataaataaccttcaaaaaataaagataaatctttttccttattagaaacttaggctgggcacagtggctcatgactgtcctcccagcacttcgggaggctgaggaggacagatcacttgagtccaggagttcaagatcagcctggcaacatggcgagagcccgtctctacaaaacatacaaaaaattaagcgggtgtggtggtgcatgactgtagttgggaggctgaggtaggaggatcacttgagcccaaaaggcggaggttacagtgagctgaagtcgaggtcttgcaccactgcattccagcctgggcaacagagtgagaccttgtctcaaaaaaaggctgggtgcggtggctcacacctgtaatcctagcactttgggaggccgagccaggtggatctcttgagcccaggagtttagatcaccctggccaacatggcaaaaccctgtctctactaaaaatacaaaaattagccaggtacagtggcacatgcctgtagtctccgttactcagtaggctgaggcatgagactcgcttgagccccgggaggcagtccagctagggtgacacagcatgaccctgtctcaaaaaaaaagagaaactttttttttttttctgagacagtgtctcgctctgtcacccaggctggagtgcagcggcgccatctcagctcactgaaagctctgcctcacgggttcatgccattctcctgcctcagcctcccaagtagctgggactacaggcgcctatcaccacgcccggctaattttttttgtatttttagtagagacgaggtttcaccgtgttagccaggatggtcttgatctcctgacctcgtgatcctcccgccttggcctcccaaagtgctgggattataggcgtgagccaccatgcccagccaaaaaaaaggaaacttaatggccagttgtggtggctcatacctgtgatctcaacactttgggaggctgaggtgggaggattgctggagtccaggagtttgagaccagcctgggcaacatagtgagacctcatctctacgaaaaataaaattatagctgccgggcacggtggcttactcctgtaatcccggcactttgggaggcccaggtgggcagatcacctaaggtcaggagtttgagaccagcctgaccaacatggagaaaccctgtctctactaaaaatacaaaattagccgggtgtggcggcacatgcctgtaatcccaactatgcaggaggctgaggcaggagaatcacttaaactcaggtggcagaggttgcggtgagtcgagatcacgccattgcactccagcctgggcaacaagagcaagactccatctcaaaaaaaaaaaaaaaaaaaaaaacattagctgggggcagtggcacatgcctgtagtccagctactcaggaggctaagctgggaggattatctgagctcaggagtttgaggctatagtgagctatgattgcaccactacactccagcctggatgacagagcaagaccatgtctcaaaaataatgttaaaataaacaaacatattatctgttcactctagaaattttagagaacatggaactactccaagtgacaaccagcatttttaagtatttttctttcctcccttcctctcataatggcttaatttagatataattcacatgtcataaaattcatccgtttaaagtacacagctcagtggtttttagtatattcacagaaatgtgtaagttgtatgatcgcatagtcaattgtagaacattttcatcaccccaaaaaggaaaccctgtacccattatcagtcactccctatatgcttgggcaactccctatatccttgatactcctagcccttggtaatgcccatctaccttctgcctccatcctgcctttgtttttttgtgcttcttttttttttttttttttttaagagggggccacactcagtcacagaggctagaatgcaggagcgcggtcatggctcactacagcttcaacctccccagactcaggtgatcctcccgcctcagtctccctgtagctgggactacaggtgctcgccaccatgccctgctcatttttgtattttttgtggaggcagagtgtcgccatgttgccccagactggtcacgacctcctggattcaagtaatcctcccacctcagcctcccaaagtactgggattacaggcctgaggcactgctactggccctttttctttcttttttttgagacggagtcttgctcttgttgcccaggctggagtgcaatggtgcgatctcagctcactgcaacctccacctcccgggttcaagcaattctcctgcctcagcctcccaagtagctgcaattacaggcatgcacctccatgcctggctaattttgtatttttagtggagacggggtttctccatgttggttaggctggtctcgaacttctgacctcaggtgaaccacccacctcagcctcccaaagtgctgggattacaggtgtgagccatcgcacccggcccttttttatttatttatttatttatttatttatttatttatttatttttgccttacccagttgcctgcaagagggagctgagggcaaggctgggaggggcagggcaatgcttattttttttctagctatgatcatgagtactttttttttaattttagagacagggtctcgctgtgttggtcagattggtcttttactcttggcgtcaagcaatccccccacctcagcctcccaaaatgttaggattacaggcatgagccacagcatccagctggcgttagtacatttttattatcaattttttacccataaccttaaagcgttagcacttttctaccattattgcccttcatatgcatcatttgcggtgggaatataatattcttttgagtggattattaatttacttaactgttgctctgtggacatttagactcttaataatttttagcatttagaaataacacaggtgaacaactttgagtaaaaagcatttgctatatttgattccattaaaatatttttaggggctaggcacagtggctcacacttgtaatcccagcactttgggaggccgaggcgggcggatcacttaaggccaagagttcaaggccagcctggccaacatggtgaaacaccatctgtactgaaaatacaacaattagctgcgtgtggtggtatgcgcctgtaatcccagctactcgggaggctgaggcaggagaattgcttgaaaccgggaggtggaggttgcagtgagccaagatcgtgcctctgcactccagcctgggcaacaaagcaagactccatctcaaaaaaaaaaaaaaaaaaaaaaaaccatatatatatttaggctaggctcagtggctcgtgcctgtaatcccactttgggaggctgaggtgggcagatcacctgaggtcaggagttctacaccagcctggccaacatgatgaaaccttgtctctactaaaaatataaaaaaattagcagggcatggtagcacgcacttgtagtcccagctactcgggaggctgaggcacaacaatcgcttggacccgggaggcagaggttctagtgagccaaaattgtgccattgcactccagcccgggcaacagagcaagactctgtctcaaaaagaaaaaaaaaagaaaacagcatgatagtgcttgacccaaaagagactaataactggggaaactggatgaatagggcttggaatggagaggctctttgctgtcaaacccagaaactcaggactgcagaaactcagtggtgaggatggatagaatgaggattatataaccaaactggcccataattacattttgaacttttagtcctttctgtcatttagcctttgctatgtaaaacaccaaccctacttgggcttaaagcaacaatttattttctatttatttatttatttttagacaaagttttgctcttgatgcccaggctggagtgcaatggtgcgatcttggctcactgcaacctccaattcccaggtgcaagcgattctccttcctcagcctccagagtagctgggtttacaggtgcctgccaccatgcccgggtaatttttttttttttttttttttttttgtacttttagtgaagacgaagtttcaccatgttggccaggctggtctcaaactcctgacctcaggtgatccacctgccttggcctcccaaagtgctaggattacaggcatgagccaccacacctggccaaaacaacaatttattatttctcattatgctgtgggttggctgggtggtttatctggtggtttcagcagggctcactcctgaggctggattcagctggacggtcacctgggctggaaagaccaagatggcctcactcacacatctggcactctgtgtcagttatcataactatatgcaataagctaaactagctgatttaacatggtggtctcaaggccaccttcccagaaagtgaggcaggaagctaaggcctctgaggcctaggctccagaactcacacatcataatttccacatgttctattggtccaatcgagtcagattgaagggcataaaaaagtaggtcccacctcctaatggcaggaagagcaaagtcatattgcaaaggagtgggtatactgggatgggaggaggaatatatggtcattaacaatctcctatatttatataggataatcattgattgccctactcctaccctctagcatttgcttttgctgtattaaaaaaggtagatgcagccaggcacggtggctcacacctgtaatcccagcactttgggagtccaaggcgggcagatcacaaggttaagagatcgagaccatcctggccaacatggtgaaaccccatctctactaaaattacaaaaattagctgggcgtggtggcatgcgcctgtagtctcagctattcgggaggctgatgtaggagaattgcttgaacctgggaggcggaggttgcagtgagctgagatcgcatgactgcactccagcctggtgacaaaaaaaaggtagatgtgatcagacacggtggctcacacctgtaatcccaacactttgggaggccaaggtgggcagatcacttgaggtcaggagttccagaccagcctggccaacatggtgaaaccccatctcttctaaaaatacaaaaattagccagtgtggtgggacacacctgttgtcccagctacttgggaggctgaggcaggagaattgcttgaacccgggaggtggagattagagtgagccgagatcatgccactgcactacagcctgggagacaaagtgagaccttgtctcaaaaaaagaaaagaaaagaaaaaaaaaggtaaatgtaatccttcaattcataactaatttttttaatagtggtaaagtgtatataacataaaataagccattttagcctttttttttcttttttttttagagacaggatttcactccccaagctggagtgtagtagtgtagtcatagctcactgcatcactgaactactgggctcaagtgatgctcctgcctcagactcccaagtagctaggactataggtgcatgtaacaacacccagctaattaaaaaaaaaaaaaattttagagacaggatcttactatgttgcccaggcaggtcttgaactcctgacctcaattgatcctcccacctcagcctcctacagtgctaggattacaggtatcagccaccacacctggtccccagtgtgtcttacacagaaaaatcacagcttacacaatctagtcttaatcctttccagctctttcagtgtgttcttgctgcatgcaaactcaaactgctcatagaactcaaagcccgcagccttctgccactgggtcaggggcagcagtcctgtagacaaaacctgtaatacacatacacacacacacacacacacacacacacacacacacacacacaccccattagatttcaggatgatgtcttcttaggaacttggtatgaaactgcatttagtctatttaaagacattgattctggaactcctggcagccaagatttccttctccagcctctttatattgacaattctgcatttgctttttggttttcagccacctctgtgatctggtttcaggtaattgagggttttctgagcaaagaagtaagttacatcgtgtccagccgcagagaagtaaaggcagagagcagtgggaaaagccatagaggctgccctagccctagccccagtgaggtcagagtggaaacatcggccatggttgatccaaaaggcagccaccccaggccttcacggaaacccgttgactcggtaagaacctcatgtaggaaaggtatgctgtgtaaacaaaggaagtaggctttggtgagccttttaaggcagtctctggttttaatttcatctggattaatttaatctctcatttgaattcagggactgagaatattttatcatagctctggatctaaacacctcagcaacatactatcccccatgctacccttttatgccttatgtcagtttttacgggacttgaaagtcagaggtttagaaaccagaggagagtcttcataaaccagagaagacgtgttgggattggtctgcgcttgggcaggagtaccctgagtaggcagccattcccttcttccttgcttgcatgtatgaagggccaagagtttggacaatacacatgttatgtctttgatttaaaatggaatatggcttttcccctctaggcttgcattcttattttgtctaacatattaatattaaaatgtccatgaacatacactgttggcattgtgatgacagatgggacttcctacgagcaaaaatttctaaagtgaaacatttgctttcattatctcctggagggtgcagagactcttaaagagggtctcaggacatttgtaacaattggatctcagtgaattcagagtgcccttctctccaccaggttcaggctgccacctcagggtgacctaaatttcctgtggctttacctttacctcctaaacgttttctaggctctcatttctaccaatcctcagttgtcactgctcccagctttccgagggacataaccccaagacataacccctcaccagctcctgtgtaaacatctttcagtgcacaggtggcctaacagcagacctcactgctcttctgtccctgtcaggtgcctctaagcagagggaaggagctgctgcagaaggctatcagaaaccaggtgagctggggcaagatgggacagagccggtggtctccagcatagggagggatttcactcttcttcccaggttcttctgaagcacccacacaaaatgcacactctgcgatatgtagtattgtcattatttccttcttctacatcaggtagtggaggctcagacaagttatttagccattcacctagagagtaagtgttgaagccagagccacctccaactctggagcctaccaagagaactgtggggatgtgggatgtggcgggacagggttgctgggtacagaagccagacttcttttacaagtaactctaggctgggtgtggtggctcacgcctataatcccagcactttgggaggctgaggtgggtggaccacttgaggccaggagttcaagaccagcttggccaacatggcgaaaccccatctctaccgaaaaattagcagggtgtggtggcacgcacctgtagtccccgctacgcaggtggctgaagcagaagaatcacttgaacctgagaggtggaggttgcagtgagccgagattgtgccactgcactccagcctgggcgatagagctagactctgtctcaaaaaaaaaacaaaaaacaagtaactctttattccttgtgtgaaaatccagggctgttaaagtttagtggcaggaggaggagttaaggtgatcttgtgagaagagtcatgctggtgacatcaggaggggtacatggctgtgatgggggaggtggtgctgctggactgagccagtggagggggaagatctgcagctagcatagtttcatgctcagtgaggatgatggtcaccgtgtttgttgtgtacttactgtgctgagagctttcctcgcagaggccctcccaacgaacagctctctcagaagcatctgttccttcctggtcacgaggtggccagagcacaatgtataggcagaccagtggtccttcctctcccaatgtggccatgtggaggacaggatgtcttcctgggggttgggatggactctctgggcactgtactctctctcctacctgcctccctgcagtccctcccatggatgactcaggcctcccagaagcaatttctatctgtccccttcactttcaggccttggggagtctctgctcctacctgactctgtgttgtaatttcaggggagcatcagtggaggaggcagtgggggcagcagcagcctcctgaccaatgcccgctcttggggagtgaggattctgcacgtggatggtaccctttctgtgctgggctcctgtggagggagaattggtgactttgaccaggagtgtcagcttttagaaggatcatggtcatgtgagcttctggtcaccggaagccagaaatactcagctgccatgttgatccacaaaggtgggaggatgtggggaagggggaaagcggtgaggacgcagagtgcaggctgtggcctcggcatcccgcaggaggtccctagaacatgccgtttcatgtcacctgctacagctctcccccagctagtatgatgatcctgttttacaaatgcagaaatgatcttaatattcatgaccactggccaggcgaggtggctcacacctgtaatcccagcactttgggaggccaaggcgggtggatcacaaggtcaagagttcgagaccagcctgaccaacgtggtgaaaccccgtctctactaaaaatagaagcattagccgagcctggtggtgcgtgcctgtaatcccagctactcaggaggctgaggcaggagaatcacttgaacccaggaggcagaggttgcagtcagccaagatcatgctactgcactccagcctgggtgacagagcgagactccgtctcaaaaaaaaaaaaaaattcggccaggtgcggtggctcacgcttgtaatcccagcactttgggaggccgaggcaggcagatcacgaggtcaggatatcgagaccatcctggctaacacggtgaaaccccttttctactaaaaatacaaaaaatcagccgggcgtggtggcgggcgcctgtagtcccagctactcgggaggctgaggcaggagaatggcgtgaacctgggaggcggagcttgcagtgagccgagattgcgccactgcactccagcctgggcgacagagcgagactccgtctcaaaaaaaaaaaaaaaaattcatggccacctaacaggtattgactctgtgctacgaattacctcatttaatcctcactacagtcctgtccccattatacagatgaggaaattgagcctcaaagggattaggcaaattgtccatggtctcaccagagtgtgtagtgtggcccaccactctcagttttactcagctgtaaattttgtgctccttcttttttcacactgtaaacaacctgtttgcagcctgtttacactagaatagttgtcttgaaccaggtggcagtgagtggtttcatacccagctccattcttgagtctggagttttctgtgatccattttagaggattggtccagatgggacagcccataggtgctgactggggcgctgccccaccccttggtaccaagatcttccaggggagtctagaggctgtacaggggaagttcctggtctgggatgtggagggcttcatctcactgaaaaatcagccatttctgacttgatttccttccctgcctttctctgttagaggagtgctagcatgtttagcccttgctggtctttcacctgagggtacagctgagtagttcacacagcatggcctccctcacagccacagctcttcagtggtgccttaaagtccttagcaagccatgaggcaccttctgttcaaagatgagttgtattcaatgctgcaaaagagcatgacacccgctcaggtgctgttccagggatagaggacccagtccttaacctccgctgtcaggagatgcagaggggatgtgtagccagaaggtggcaggcaaggctggagtgattcagtgggctggcccagcgagtttagtcctgcagcccaggaaggggctgtgctaggtaagtgaagactggaagcctttggcacaaaccctctgtcttctccacagaaatgatgatgcacgtgcaacagctgtctcttgcgtctttatgtgtgaaaaaacaacagccaaagaagccagaggtaggtcatcctgctgaactgaaggacaaatggatggttttcaatgaaatcagtgacaacttaggtaaatccatggcccacccaaaccatctcttcctggccattctgaaagatggaagaggaatgcagcctcttatttacctcagtcctagtgcccatagctttgcaacaccctttcttctctcttctctgtggcacttgcagtcctcccatggcacacaccctgctgagacatccctatggcctggactgcctgggccatgggctccctacagtagttctggaccagataaagttcataaatgcccatggcactgaccaggctgctattctggaactttccctgtacagcctctagactgggaacgagtctgcatactgcaggggtgagaaggagtgattgaaatagctgccatcttctaaatccttgtttgttttccattctttgctggcgttagaactgtgtgtactacatcaagagagcccaacctggtttaaagccacagtatcttcacccaagcctcaatctgaggaaggattaaatctacagatctacccacagcctggcatccaggcacaggacgaacagtaatagctattagttaacagtgctaattagctaacagaactagcaagccacatccaaagtggatggagcagctgggcatggtggctcacacctgtaattccagcactttgggaggccaaggccagcagatcacttgaggtcaggagttcaagaccagcctggccagtgtggtgaaaccccgactgtgctaaaaatacaaaaattagccgggcgtggtggcacatgcctgtaatcccagctactcaggaggctgaggcaggagaatcttgaacccaggagacatgttgcaatgagtcatgatcgcaccactgcactccagcctaggcgacagcaaaattctgtctcaaaaaaacataaaaaaatagtggatggagcattcagacactgacgccctctccacaccctctcctctaggagtgttggggacattgctgctgttaaatttgtgttattcaaaattcaaaagggtatacaacaaaaattctcgccctgctccagcttctcctcaaccactgaccttcctccctgaaagtgtgaacagtttctaggactctatgcacatagaagcaaatatgtcaaaaattccccccttctatgcagatacacagcatttttactttaacttaatcagttttgtaggccgggcacagtggctcacgcctgtaatcccagtaatttgggagaccgaggcaggtgaatcgcttgaggtcgggagtttgagaccagttggccaacatggtgaaaccctgtctctactaaaatacaaaattagccatgtgtggtggcgcatgcctgtaatcccagctacttgggagggtgaggcaggagaatcgcttgaaccctggagacaagttgcagtgagctgagatcacaccactgcactccagcctgggcaacagagtgagactctgtctcaaaaaaaagaaaaaaaaattagttttgtagatatctagcagtgaagtgagttttgggtgtaatgtgctgatacgcaagggaatgtgagaggcttctttggattgtgtttgcccccaaggtgtggcctagaggagaatctggaacttcttaaggcccagaggcacaggtggtcatggatccaccatcatcctggccctccagctaaagctgatttttttattttattccatttatcttacatttatttacttatttttcaggtatataccagaagatccatttactcttttttctttttattttatttgtttattttactttactttttttgtgagacaaggtctggctctgtcgcccaggctggagtgcagtggcgccatctctgttcactgcaacctccacctcctgggctcaaaccatcctcccacctcagcctcccaagtagctaggactacgggcatgcgccaccatgcctggctaattttttttttttttttttaaagatagggtcttactatgctgcccaggctggtctcaaacttgtgagctcaagcaatccacctgcctcggcctaccaaaatgttgaaattacagacgtgagccaccacgcccggcctccatttactttttaatatcagctttgtttgaccttggcttaaacattgattttgacccacaggatcagagtacacaagataggacataggaaagcaaatggctatcgtctttatcctagtcctatagggtacctggaacagcatcagtacctagaaaataaagctgccatttagtgagcatctattctgtgccacatgcgatgaggtcggtgggtactcttcacattgcaggtggcagagctgaagtacccaccaggcctctgggactccagagttcttgctctctgtactgtcctgcactccctgcacagtcagctgccattaagattcacacaccgagtgccccccttattcatcgtgttgccgaagagggagccgttgtgcccaggtctgctccagctcagggcctgagagtctggttctgcaggcctctcaacagcaggaagcaaagtgggacagactggcagccacttggcttatcaggcccagttccttgacccccgtggcttcctcacatccttaacctatttttcctttccatttagggaacatgtccagcagcagagtcaagaacacggaaaggtcagtgtggtagcttttcctcatctaattgcaatccctccctccctaaacacttccccacgactccctctgtggcagcatctgctcacttttctgtggcagcaagcgagtccaggttatcttgcccctttgtgtttccagggcctggtcctcaggtttctggagcgagagaggcatgcccaagagcaagtccagagctgctgggccggggcttctcctttagagccaagaccccatgcagacactttggctcctgtgtcctctggctgttcctgggcatcgattgaggttcagcatccttttccttctgattcagtagcagtttgggggtgggcagtttgacagctgcctaccgttttcagaactgccaaactccgtgaaactgacaaactggcagattgatggactccgtctcctggttcctcttggacagcaggagagttgctccccctggatgtttctcccaaagatgctctttcagtggcatttattcatgcacaagcaggagctaagaaaagtcacttggcacctctctcatgctcaaaattcaaggaagtctgtaggggaattgattttaataactgtctcagttaattagaaagacaagaaattgtccccaaaaagtaattaatgagagctgctgctaaaggagaaaaggctgctttttgcttgggtgctactggtggcctcaagtacagttgggagctgtaaggtgccagcgtctttggggaatttatggctgtcagatgggcccaggatttcagctgccttggctgccccttcgacaggactcctggtcactgtgggtcctgatgcctaagggattttgtaagctatgcgaataactatctaataggggtgagtctcttaattgactccaaattcatcttctcagcactcctttgccctattttttcaggaatcagattttacctgtgatatttttctaccatcctgctaataagaccactaaacactctttatccctcttcctctctgcttcccctccaaaaaacccagggtcctcctggagcattctgcctgggagttgatcttaggcccctcagtatcctgaggctccagaagcaaagggctaggaaggacctgggactttgtgggaatgaccacccccaccctgcttttagcagaagccatcaggggctgggtttctcccaccaaaccagccaggtgtctgatggtggtggcatctttggttggtcgatagcctccagaatccacacacaggagctcctgcgtcctgcagaggaagggcccatctagggcttcagtgttaactgcagcctatccccccactggtgcaacctttctcccaggggtagaggctggagatctgagtgaatggagagcgcagcctggggtggcatgatttccagctcttgcaaggctcttaggctttggcagagccttccctctcagcatttcctgcatgtgtggtgcaggccctgcacaggggcagacagatagctgatgtgtgcattcttcccctttcagtggccagactgaaggccccgttcctcaaaatcgaagatgaaagcaggtgagtgggacctcctttctctgcttgccccagctaggcctgcacagaggagggaggagggaggggtgctcaggggcctcaagctaatgtgaagacatggagccccttaaccctgcaccttcatcttcctgagaagccactttctcccattgtcatggagaagtctcatgcaaaccaggaggagcctcagagtggcattatacagtgaatagtcctcttggagatgagtcagaggttaatgatcctgtgtgtgaattacctccatttaatactctgctctatgagctcatggtgtcccatgcaggctcattattgcaactcctttccccttgggtgtatgctgacatttcatgtcaaatcattacccagtcacagtgctagtatagtccaagacatcatcttggctgaaattagggtgctaggggtggtactggggattcccttgtcaggccaccctgtacttgataaagcctttctgtttcactttgaaaatcgttttctggctcatgttacctcctgacagccctgggtgaaaaaagcatgaggagagcccatctcttcctaatggggaaaactgaggtcagagaaaggaagggacttgtgtacagccaccttgctaataaattgcagcctaaggctagaatccaggtgtcctgcctaccctgtcttgtgtcttctctgtccaccattatgatctcctcttccctcggagcaggagggtcccatgacaatgttaacctaatgagctattagcagccatgttggttatcactgaatcttcagtaagtacaagatcgaaagtgtatgtgaatctataattatctcaaaatttaaatttttgtttttaatattttttccaaaaaggcattttcagactaaataaattttttaaaggaaataagtccatgtgtatccagcagagactactgaggacagaattgtctgtgtgcctcagacagggaagggcagggcagctgagaccagccctaggagcctggcatgcctgcccatcctccagacaagcccagggtcacttctcagcacctgcagacagtgctgcgctggctttggtggcccaaaggcaagtggagagaacaatgggatggtacagaggtgctgtcttccagttccagtgggatggattgcgtgttcatccccagccccttcacacctatttaaatgtaggtaatcatgacacatatgcaacggctgaaaggcactgttacagcctcagtatctgcactgcacatggcaggcacaggtatatcactgtcaccagagaggggtacacatattcctggcattataggccagagaggagatccaactggagctgagatttcttgtgaaatttttttttttttgagacggagtctcactccatcacctaggctggagtgcggtggcacaatctcggctcactgcaacccctgcctcccagattcaagcgattcttctgcctcccgagtagctgggactaaaggtgttcaccaccacgcccagctaatttttgtattttttgtagagacggggtttggccatgttggcctggctgatcacaaactggcctcaggtgatccacctgccttggcctcccaaagtgctggaattacaggtgggagccacagtgcccagcctcttgtgattttttttttatgtgctgttttgaagcaggtgcattcaaagcctattaggcctattagcctgcccatcctcaagtttcaagccccctaagcagaaacaatatcattgaagaagaaagaaacatgccagggttgtgaggggtacccccttctccttaagggtccaagaagacttatttgttaattcactgctgagctacagtactcttaccctgctccctgagaacccctggcttgcactgtttcccccagaacatggaccattgcaaccaaacatggtgcacccggcagttacctcacttggcagggtttgcgaagtatacacagatcacttctgtctctgcaaatctcttaaatgtttgcaacttgaggcacactgccagaaccactcagtccaggtctgactatccagaaccttcactgtgcctgtcttctcctttcagaacccagccctcagatagttctaaggaccagcaagaacacttcacagaacagggaaataactgttctggtttaaacattcttccatttagaatctgccaggctagagtcctcaaagattgttgtagggtcaagaaacaaatgggaaggtggggaaaagtagatcaggagtctggagatgtggcttctgatctgaccttggctgcttaactatttgtgagcccttgagcaagtcacagaacctcttgggcttcatttccttagatataaaataggataagcccagagggtgcttataggattccagggaggcagtggtatgagtttgaaaagtagacagggaggggccgggcgtggtggctcacgcctgtaatcccagcactttgggaggctgaggtgggcagatcacaaggtcaggagatcgagaccatcctggctaacacagtgaaaccccgtctctactaaaaatacaaaaaattagccggccatggtggcggacgcctgtagtcccagctactcgggaggctgaggcaggagaatggtgtgaacctgggaggcggagcttgcagtgagccgagatcgcgccactgcactccagcctgggcgacagcgagactctgtctcaaaaaaaaaaaagaaaagtagacagggagaacatatgtattaatttaacctagaaaggctgatgagttttgttatagaatttaaaagatgtggaggtgagagtccactttatcagggctggaattctagggcattgggcgaggccccctcctcagcctttaccttccccattgtagtcaaagtggaagttttctctgttgcaggaagtttcgtcctttccatcatcagtttaaatcctttcctgaaatttcttttcttggacccaaagatgcaagtccctttgaggccccgacgaccctgggcagcatgcaccataccaggtgggtctttctggttcctgagtaccaagggctggttacaggccaaagtcctccccatcgggggcctgctggtcagatttgggaatggccatgtgtttgctccttaggcaaagtctattctgggaacgtagcccagagaagagagactaggagcgttcatccattttattttgtgttcttcatccgtactgaagaatttaacttgaagaagaaagggaggtgccagggttgtgaagggcacccccttctccttaagggtcgaagaagacctatttgttaattcactgctgagatacagcactcttaccctgtccgcccagaacccctggcctgcactgtttcccccagagcatggaccattgcaaccagacatggtgcacccagcagttacctcactcggcagggtttaccgagtatacacagaagacaatagaccgctttctcaaactcatatctatagaccaccattatcagagtcccctggggtctctttaattaaaaatacaagttctagctgggcacagtggctgatgcctgtaatctcagcactttgagatgccaaagtgggaggatcacatgaggccaggagtttgagaccaacttgggcacacaaacatagcaagactctgcctctacaaaaaataaaaataaaaatgtaaaaaattatgagtcaggcagagtggctcatgcccgtaattccagcactttgggaggctaagggggcggatcacttcaggtcaggagtttgagacaagcctggccaatatggtgaaaccccttctctactaaaaatgcaacaaaaaaaaaattagccaggcattgtggtgcacacctgtaatcccagctacttgggaggctgaggcaggagaatggcttgaacccggcaggcggaggttgtagtgagctgagattgcgccactgtacttcagcctgggtgatagagcgagactccttctcaaaaaaaaaaaaaaaaaaaaaattagtcaagcgtgatgacaagtgcctgtagtcccacttactcagatggctaaggcaggacaatcatttgagcccaggagttcaaggttgcagtaagctatgattgtgccactgcactccagcctgggtgacagagtgaaaccctgatgcaggttcctaaactccaccccatatctatagaatcaaaatatctgatgatggagccccaaaagctgcattttacaagctctcatgtgatttcagtgaatatcaaagtttaaactggttgggccaaacatcaggaataactaaggggcggggcgggggagaagatcgctgcattacgtggctcatggcttgtgggcttgttaatgtttctactctgcagatgtttgagaatttgaaccctcattaaccaaagtagagaaggaattcagctcaggtgatgggtgagatgccttctcagaccctttctaacctctgggctgtggggttatagaccaggagagaacagagcagactctcagccctggagttcctggggccaaggaggctctgtggtttccatcagctgacaaaggctgtgggtaagaaaatagtacaaataggagggaaaaaattaagggaatgtggcagtagatgaaatgggagcaaagagagaaagaggtgaggttaagtcccaatacaagggataccagggagagccagtcagaaggtggcccaggcttggcgctggcagtgatgctaggcctgggatggccttgggatcacagaggagctaagaggctgtaaagggaagatgaagcaatgaagctttggtatctgcatgtgaggcgcctaggcagggagttggccctggtgggacatcaaagttccaggcacgtgtgtatgtggaaaatatgtgtaggaagaagtgtttaaatttttacatttttgaaatcattattatattttaaagtttaaaaatttttaaatttaaaaagtttaaaatttgtgttacaaatggtttaatgtgaaaagtctatattccacacccagcctccagttctatcccctcactggtgcaaccttcctcccaggggtagaggctggaggagatccgagtggtgcctcacccctgccaaatggagagtgcagcctggggcagcatgaaaagaaaaagcaagtaacatccagcatagtcaatactgtatgattctttttttttttttttttttttgagaatgagtcccacactgttgcctaggcaggagtgcagtggcgtgatctctgctcactgcaacctccgcctcccaggttcacgcgattctcctccctcagcctcctgagtggttgggattacagtgcacaccacctcgcccggctaattgtttgtgtttttagtacagatggggtttcactatgttggccaactggtcttgaactcctgacctcgtgatccacccacctcagcctcccaaaatgctgggattacaggtgtgggccaccacacccagcctatatgattctttatgtaagaagagggaacgaaggatacacatgtacctatatatccatgaactatctctggagatagaccacacctgtaatcccagcactttgggaggccaagggggaaggatcactttgaggccaggagttcgagaccagcctgggcaacataatgagaccacccccccccccccccgcccatctctatttttatatttttaaaaaatctggccagacacagtggcttatacttgtaatcctagcactttggaagactgaggcaggtggatcacttgagctcacgagtttgagaccagcctgagcaacatggtgaaaccccacctctattaaaaatacaaaaattagccaggcatggtggtgcaagcctgtagtctaagctactcaggaggctgaggctggggaattgcttaagcatgggaagcagaggttgcagtgagccaaggtggtgaatctgcacaacagcctgggtgacagagtagaccctgtctcaaaaaaaaaaaaaaaattgcattcccttttatggctgcagggtatccattattccattgtatggaatgtatttactgtattttatttaaccagtctgttattcatggatgcttagattagctccaatgaaaatcatgttcagagtaaatttgcaattgctcatttgtggaataaattcctaaaggtagaaatattgggttaaaagatatatgcatttataattttgataaattcagccaaatggcttttcatggagcggataccaacttatatgtttacctacactgcatgagagaggctgtttcccatccccttgcctcatgctgtgactggcagatatgctgacctccagtataacagattaaaaactgtatctcagtataattataatttttgttttttcttactatgaatgaggctaagtaagtttgcatatgtttggttgtttgaatctctttttatgtgaaccttctttttatactttgcccattttttatttggttattgatcactttaatgatttgtaaggagcccttctcatattagaaaaatgagctctttgttattagttgtaaatattttcttttctctggtcactgcaacctccacctcccaggctcaggcaatcctcccatctcagcctcccaagtaactgggagtacaggtgtgcaccaccacacctggctaatttttatattttttgtagaggtggggtttcaccatgttgcccaggctggtctcgaactcctgcgcccaagtgatcctcccaccttgacctcccaaagtgcagggattataagtgtgagccactgtacctggcagttgtaaataaatcaatatatatatttttttcctaagcctccctgagcagagaagttgtaaatacttttaaaagacaagaaaaccccaagtttgtggtttgtcttttaactctgctatattagtccattttcatactgctatacagacctgtctgagactgggtaatttgtaaaggaaagaggtttaatagactcacagttcagcatggctggggaggcctcaggaaacttacaatcatgatggaaggcaaaggggaagcaaggcaccttctccacaaggtggcaggagggataagtgctgagtgaagggggaagagccccttacaaaagcatcacatctcatgagaactgtcacgagaatagcatgggggaaaccacctgattcagttatctccacctggtctctccattgacacttggggattatagggattacaattcaatatgagatttgggtggggacacaaagcctaaccatatcatttgctaatgattctttgccatgcatacatattttaaagttgtatatagctgaatttatgagtttttctgtatatcttctggggtttgtgtcatacttaggaagtctttaaaaggagtgttttggacttgtcgagtttgctggacagccagatagaaatgccctttggttgttagaaatatggggctgatattcagataagaattcaggcttggccggatgtggtgactcagtcctgtaatcccagcattttgggaggctgaggtgggcagatcacctgaggtcgggagtttgagaccagcctgggcaacatggtgaaaccctgtctctactaaaaatacaaaaaaaaaaaaaaaaaaaagaaagaaaattagccaggcgtggtggtgtgttcctgtaatcccagctattcgggaggctgagacaagagaatcacttgaacccaggaggtggaggttgcagtgagccgaaatcatgctgctgcactccagcctgggtgacagagcgatactccatctcaaaaaaaaaaaaaaaaaaagaagtcaggtttgaggaaggtttgaaaatcctagcggacagtgaggacagctgtgagagatccaaggcagcatgagagaagggacagactgaaccaagctggggagacattcagggtggaaaagaagagcagtcccttcactgtggttgagaccttttccctttcatctttcaggtctcatgaatgtgggtgtaggtttgagcacagagttggaattcctacaagggattcttgctgctgccgtcaccatcccatcttcacctgtcgtttaagagaaggacggagatggctggcgcggtggctcacacctgtaatcccagcactttgggaggccaaggcaggtggatcacctgaggtcaggagtttgagaccaacctggccaacatggtgaaaccccgtctctactgaaaatacaaaaatgagttgagcattgtggcgggcgcctgtaatcccagctactctggaggctaaggcaggagaatggcttgagcccaggaggtgaagattgcagtgagccaagatcgcaccactgcactccagcctgggtgactaagctagactctctcaaaaaaaaaaaaaaaagagagagaggacagagataagacaggctgcccacagggaggtctccagacgtcttcttccttgttcccctcttgccattcttagatgattggtaccaagctcagggaaggcctgcctgccggtgcctgcacagccccttggccatcttggtccttcccctccctgacctaggctccaggctctaagtagtggctcctccccccaagggccccagcagtaaccactttgccgcactatgtaccctccccagagaatccaaggatggagagccaagcccacgatcagctgcccacaccatgcccaggaggaagaaaggctactgcgagtgctgtcaggaggccttcgaggagctccatgtggtgagccccttccccattaagcagctgctcccagagtgccctgagggagcctgctcactggggatgagtccttcctatgcgatctctatgctgctatggctgtcctccagggccagagcatgggctgggaggtcagcttccgtgtccccctccccccaggcctcatctaatgccctgtgctcctctcccccgccggcagcatcttcagagtgcccagcaccggagctttgccctggaagcccatctatatgcagaagtggacaggatcattgctcagctcagccacagctttgcagacatccctttccaggctggcctccccaggtgagtgccacgctggcaggcacaactgtgtctgctctctcctctgttgccctctgggtgggaagagaccctcaggttggtggctgctgggaccagactgtgatgttttcctcttttctcaccttcctttccccttatcctcagtcctgtttgttttggggctggccaaaaaaaataaaaagacctccatttgtggcttcacttgatgaagactagacccagactacactgtggctcccttccaactccacaggctttgatgtggttgataagcagttctggccagggagcagggggttagtgcttgggcctctcctagataggtgaaaagcaaagtctttcccctctgtagaagtcacccccagaaagaaggactgcatggggtttggtgggaattccagggccctctgagccctgcttccccttgctgccagcaaggcagaccctctcccacctggggctgtggcttcacctctcaccccaaatctccacctcaagctcaacttgcacagccaggcactgcgctgctttcttcagctgccaaagggcacagcctcctctgtgaagtcatgaaatggaatagcctctaacctattcctctggccggccccaaccacaggctgcagagccaagagaagtgcacacagtgctggttgctgcggcaggttagacccaaacaggaggactttcacacagggcctcagagaaggcagctctctcggcacatgaaccgccagctgtggcagctctccctgtgccctcagccctggcccaggcctgctgtgaagttgaaacctgcagctcacagtgtttctgtcccaacaggtggtcaggttccccagcttctgattgtgaccctctctgtcctgagactctgcacccccatcagccctcccatcccagggcagcatctcccaggataaggaaagaagacagctgccaggcatcaggtatcccagagcaggatgggacagtggacagcacgcaggcaccagctgaacgtgcagggactggtgaggtacctggacctatagcaagctgccaggacctgggggtgtcagttgatgtgtttgtggaccccccagggataccagtgtccaggagccctgcttgccaatgcctcctgcctagctctggttttatggaactctcctctggcccagacctggcactttttggccacaagcggaaggttcagttccccagtggcagtgctaagaagagagtgggggcctcctggccacaggcttcattttttgtcccaatagcccccaacccctgcggcaccaggacaactagtggcaagcgtcttccctctcttccccttacaggccatgagtccaggctcctcgcctccctccagcccttgtgccactcacagacctgcctctctctcccagaccccttcccctggcagcccacagacagaccagcagagttctgggccacacagccctcctggctggggaaagggtggcccccagggcctgaggattctgagtgtacagccactggccctgtatcccaggaggctggccagctcctcagctgccccacagctccaggctggccatcagctcccctgtactcagctaccagtgtgcagccctcgggagcacctgtagagagcaggtctacctccctcctgcagcccctgccagccagtgcgggagccagctgttcccgatgcctctgggccccccagcctctccaggtgccctgtctccctgtctcccagccctggtcccaaccccagccccagccccagccccatgctggcagagagctgctcctacgagtccccaaggtgcttggctcttcacagggccaggcagctccagattgaagggccacagatacaacttactcctctgctgggtgctgcacacccggccagggctgaccaggacgcaggaggggcagaaccccaggacttccccaaaagagctagaaggaggcccgggcctggcctttgaagtccagcaagcagctgtcacgctcagctccatggagctgacagagccacccctcccactggccaggtctttgggagagaatctgggctgggggctgccctctcctacccctgcctcctgccatgttcctgaccaggcagagtctacagtgggcttgcccagctgaggctggccgcccacgccaggaggcagaggcgaagttggcatggggagggaccacaaaggagctggggcagcaggagtcctggcccggcttcctggccctccacaggcccttgcctctctgcagagccgcgggttagctgttggtgtgctccacccccaaccccggcctcctttctcacgagcatgtggccgctcctgctttccaaaatgactgtgtttgtcccctcccccagccccccacgctcccgcacacagatcctcaggaacatatgaagcagaggaggggcttgggctgcaccactcacagagctccctcccccaggcacttagttggggcccagcactgacctttcccctgagcccaggatgtggccagagccccctctgggacccctctcgccccttctctgcctcctcagcttgagctgcctgcccgaagttcggctgttccggggccagtgtgtcacctgccaacttccacatcaccctcctccctcgctccctcctctccttccccaaggacctccccccatttctggcagccaagccattaatctggagacagaaatgggtttgctatcgattctctggccactttttctttcattacaatttgtaccgtgattcttctcacccttctctgcgtccgtgcatttaaagagttgtctctttaaatgttgaagcttccggaagcctgatgctattctgtgtctcctttcaaaggaagaagggggggcccagctatgggtgaggactcaagttattagtttggaaatagagcaactatgtgtacagcccaccttagaggtcatgttacccccttcctgttaaattttacaattaattttggttcaggaaatgtaaataaatttgttaattacaaatagcaaagagatggggctggaatgccatatgtcggtccttgatctgccctccagtgacccaaggcagggctgcgggccagcagcgatggacagaatcactagatggtgtgatgggacctcctgcaagtcacacatgtgtgagtgccacaaccctcctgccggccttgcccaagggctccagggagcagggctgcctctgtccctgcccagcctcctttacccagtctcatctggtcacttccttggctctgctgcctggggagtggtcgcctgcagaggacatgcccctccatccctcccaagaaaactcctttgccccggcggacattcctgttaagggcccactcctcttccctgaagccagaccgtggcttatgtctgcacgctgctgggttcgtccctttccttttgtgacatggggttgcctcattccccatgacaccacccctctgcatgaggaagtttccccttgcccctgtctcagacttggatacctttacctgctgctcacacaaagcctgtggtgccgggttcgggtgccctcattgtcaactgcaggacccattccccgaacctcacatccgtgtacccttgccttcccctcctatctcaatgatcatgaccttggacatctctgccaggccaaaccccaaggctggaacactcctcagccatttctccattgcggcttcctggctgtagactcaggttagaggtgaacccagaacacctgagacttgacccaggatggatgggtgctgcttgatgtgaatgaggtcccgcagtggctccttggcgtgagcactgctcagactcctttccactccagccccctttccacatcgcaccagatgacttttacccagacccagtgggcattgccttatcttgcagtcagtcccttttcaacatgttgccgtttctttctgaagaggtgtcctccctccacaagtcacactgtctgtccctggccctccagcccacctcgccaaccactcttgttggtttccttctcagacttgccacctttcccctctgccccaaaatgccatgctcctctcctggaaaacacttgagttgattcagtaaatcgacttcaaatacttgaaggctcccaccttctgttctctggctccttcctgcggtctatacctaccgcctcctcttcacctccttcccttccacacttccttcctgggtagctctgcctgaagcattccactaagatcatctattccaaggtcatggacaggctactggtgaccaaagttggttccttttctcctttctttcctccttgaagcctggctcccttggtcgcagcagcccctcagtggcctggttctcctgtccccctgcccttcctcaccattgcccattccctcgttcgttcattcagcacaggccttgccgtctgccctgagtcagctccgagacacctgaagagccctccagccctaactactttactcagactaggtccccaggcctttgttcttgcctcttctcgctgagcctttcacttctcggcagatgtgaccgattggtagctccaccccaactcccttctgctgggtggaatgcaggagctagctgcctccaactcactgtgacctcagaaaaatgcctttattactcgggcctcagtttcctcgtctttaagtaaggggcttggatgagatgatttcaggaccctttccaataataaaatactgtgactgccagcaaatcttttatgtctttccctatcctgccaccagcaggagtgctgtatacccgagcactccttctcatcctggatcttggctccccttcccaggggagtttcagctgtgcccagctcaaactgttttcttgatctaaaaaatggaggtaatctaggctgggcacggtggctcacgcctgtaatccctgcactttgggaggctgaggcgggcggatcatttgaggtcaggagttcgagaccagcctggccaacatagtgaaaccccatctctactaaaaatacaaaagttagccgggcatgctggcatgcctgtaatcccagctactcgggaggctgaggcaggagaatcacttgaacctgggaggcagaggttgcagtgagccgagattgtgccactgcactccagcctgggcaacagggcgagactgtctcgaaaataaataaataaataaataaatacgaaaaatggagataatcatagttgctacctcgctaggaaatcacaagagtgaaatcagatgtgtttgtgaggtatgtggcacagagcttggcacattgtctcaacaaataacatattacccacaggcacacatgcctgtgaggcctccctcctaaacttacataaagcttattctcactaattcccacctggcagtgtcccttggtaactggcgtcctcatctcgggtgagcatttgtggatgaagctgctgaggggcactgtgagaccccctgtcccaggccccctcccaagggccctctcctgagctccaggaggatcccttttgtggaaaagaagtggcacttgggcccttatgggtgtgactgtatttgtgccccacagacctcccaaaggatgagtgtgcctgggatcctggtgccccaggtgcccccaactcctcccttggtgaagcctgagagcttcagagattaaaagaggggccacttggacgcctgagagggaggagcatgaggtttcccgggagagctatgcagatgagaagaacggtccttggaccctgggctggcatctaagaggaagcaggatgaacttcctgtccaaatgctaggcacttcccctgctgccacccctccacatcacgacatcaggcacaggttctctctgtgctgggtagagagaggaccccgaggaccccaagccatagagaggcctggggtcctgggcaagggccagggagccggtttgctcctcggcgccttggacggtgcgagcccagggtgactgagcccctttcatgtgccagacgctgctccaagcatgggcagctcagccatcatccccgagaggagcactgtgaggggggtggttttctaacccctgtgtcgtggatgaggaaaccaaggcccagagaggccagcgggcttgctcaaggtcacacagccagtttgtgggggaggcaggattgggaccccagcctggagacctgaatcctgcccccttgactagcatggtctgtgctgcaggacttaaggctggtcaccaggcctggacggcctccactggcaggaatcactgccggtggtatcaccccagggctgggggcaaccaggacctctcccttacctggagttgcggagacaaggtcttggccctgcatccccaacttggcccttatgcaggaaaatttgagagaaccggctaaagagctagaagagcagcagaaggaaggaggctccggcctcctagggaaggggcttcctaagggaggccagagacccacccctcagggccccacagctccctcagcaagagcaaccccaagagtggcatcagggcagcagaaatagtggccccagcctcaatggatggaccgaaggagccagccatagctatgaagttgaggtggggccccccagggaaccctatgtttgagggggagacacaggcctgccccgatctaagcagaaaacagcccttgctatcagggtcaggtctgatgaggaggacaagccctgctcttctgaagtcccagtctgatgaagggccaccaatgagaaaacagacagccctgacctcaggagggacggtgggtgaaagaacgtgaagcaagctttctgtgtggggatcccacagctcctaagagagctgaggcaagcatgagacaggggaggtggaacctcagggactggggactgtgatcaagggagaggcaagaggtctagccgaggccgggtgccagggttcacagatgtaatctaatcccagcactttgggaggctgaggctggaggatcacttgagttcaagagttcgagactggcctgggcaacataaaaagacccccgtctctacaaaaagaaattttgttagccaagcatcggcctcatgcctggtaatcccagcactttgggaggctgctctgcctcccaggttcaccccattctcctgcctcagcctcccgagtagctgggactacaggcgcccaccaccacgcctggctaattttttgtatttttagttgagacagggtttcaccgtgttagccaggatggtctcgatctcctgacctcgtgatccacccgcctcagcatcccaaagtgctgggattacaagcttgagccaccacgcctggccttgaatggctcttgagtccaggtgttgagaacagccaggacaacatgatgaaacccaatctctacaaaaaatacaaaagtgctgggcacggtggctcacacctgtaatcccagcactttgggaggccaaggtgggcagatcacttgaggtcaggagttcaagaccagcctggccaacatggtgaaaccccatctctactaaaaatacaaaaattagccagacatggtggagcacacctgtaatcccagctacttgagaggctgaggcaggagaattgctggaacccggtgggaggaggaggttgcagtgagccgaggtcataccattgcactccagcctgggcaacagaacaagactccgtctgaaaaaaaaaaaaaaaaaaaaagccaagcttggtgacgccacctgtagtccctgctactcaggaggctgaggcaggagatgacttgagcccaagaggtcaaggttacaggaagctatgattgtgccactgttctccagcctgggcaacagagcgagaccctcaaaaaattaaaaaataaggtctattgcctgcaatcccagcactttgggaggctgaagcaggcagattgcttgaggccaggagtttgagaacagcctgaccaacatggcgaaaccccatctctactaataatacaaaaattagccaggcgtggtggtgcacacctgtaatcccagctacttgggaggctgaggcaggagagtcacttgaacccaggagaaggagattgcagtgagccgagatcatgccactgcactccagcctaagcaacagagtgagactcccatctcaaaaaaaaaaaaaaaaaaaaaaaaaaagatcggctgggtgcggtgggctcacgcctgtaatcccagcactttaggaggccgaggtgggtggatcacctgaagtcaggagttcgagaccagcctgaccaacatggagaaaccacatctctactaaaaatacaaaattagctgggcatggtggcacatgtctgtaatcccagctactcgggaggctgaggcaggagaattgcttgaacctgggaggtggaggttgcggtgagccgagatcatgccattgcaacaagagcgaaactccagctgggggtggtggctcaccctgtaatcccaccagcaccctgggaggccgaggcgggtggatcacgaggtcaggagatcgagactatcctggctaacacagtgaaaccccgtctctactaaaaacacaaaaaaattagctgggcatggtgttgggcacctgtagtcccagctactcgggagactgaggcaggagaatggcatgaacccgggaggcggagcttgcagtgagccgagatggcgccactgcactccagcctgggtgacacagcgagactccatctcaaaaaaaaaaaaagagcgaaactcaatctcaaaaaaaaaaaaaaagaaagttctaggccaggcatggtggctcacacctgtaatcctagcactttgggaggcaggcagattgcctgaatttaggaggttgaggacagcctggacaacatggtgaatttaggagggtgagaacagcccgggcaacatggtgagatcccatctctactaaaaatacaaaaaattagccaggtatggtgacacatgcctgttgtcctagctgctcgggaggctgaggcaagagaatcacttgaccccagaggtggaggttgaagtgagccgcgatcttgccactttactccagcctgggtgacagagcgagactctccaaaagaaaaaaaaaaaatagtaagttctagccgggtgcggtggctcacgcctgtaatctcagcactttgggaggccgaggcgggtggatcacgaggccaggagatcgagaccatgctggctaacatgtgaaaccccgtcgctactaaaaatacaaaaaaaaaaaaaaaatagctgggcgtggtggcgagcacctgtagtcccaactattcaggaggctgaggcaggagaatggcgtgaacccgggaggcggagcttgcagtgagccgagatcgtgccactgcactccagcctgggcgacagagccagactctgtctcaaaaaaaaaaaaaaaaaaaaagtaagttctagccagatctgctgggagccggggaacccaggaatataagtggctatgggggccagggagccatatgaccgagtctccactggaactagcccagggtgccaccagggagagtcactcttagggctcatcaggtctccccaacaggaagtctagggtcccagggccaccgatgtggtaggaacatgcctctggtgaagaggcctggaccacagattgggcttgctctgtggtcttgaacatgttggaggacccagactctcccagccccgggctcgcactgtgaaatgacaaacctcacccagcctactggggggcactcctgatcgggacttgctgatgtggccctgggacatgggcaggctggagcaggacagccaccttcgtgtctggggtgtgtggtgagggtgcatgggaccagatataccagtcccctctggtcccaaatggagggcagagatggaagtaggactaggggtggctaagaggagtggggccatggagtatgggatgtgcctttcaccagctgtgtgactttgagaagctcacataacctctcagagcctcagtttccccatctgtaaaatggggagcacaatctctccctctgggctcatgatgagtttccaggaataccacctagtaggccctcattcccaggagcctcctcatgcctacatcttggaggaggttctcaagatgtctccagagcgaaggaagaattggctcagccttactgagcatctgggcctggcatggcaggtggttgggggtggggggagtcacttggttccctacattgatgtcagcgcctcctgggaaatcgccttctcacctctcctgggcctaaaatagagcggggggtgggggtgtcacaagctagaggcagttccctcatccccagcagaggccctgggtccttgcggaagcagaggacccaggaaggggtttcctgcctccaatcttgttcttcagcaacctgtggtcccctagcatgggtaccaaaaaggtcagggtggggactcagcggcccacccaccatgccctaccacaccccacaccatctcaggtatctggccttcagcacccctagcagaagtctgaggtcccagccctggtattgggacccaacatccccaggagctgggtggagggcacagctgggaatgtaggttgggaggtcaagtattttgcagacagggcagcctagtctgaccagagagggaatgctggggggctccagaggtgtcttctgctcctaaggattgggactagcaagggagggggagccatggggcatgctagcagcatataagtgacctggctagtttatattttatctaggaggaaggacaggacgcctgtgagagactcaggaacccagacggacatgccagcccttcctgatggttggagtgacagcgatccctgaagccctcctggaggccggggcatctttggcggggagaaggagccgatgggaaggggtctgtaccgcgggcgtgagaggactccgcagtgacacgacccgtagcgaaggtgcaagaaatcccagaggcgtagagcccggcgttcgccaagagcctttgcccaccccaaccccagcttccacagcctggggtcaagcggggcgctccaagctggggctggggcagcctctctggggtaccacgacagaggggcgaacgtgggcgccgcagccacgcccctgcccccgggccccagacaggcagtcgccgggtcgaccccgggggtaccccgtcccctgcttccctcccctacaaatctacgagtcctcggagatgctcaggcagaggtggccgaggagaggccgcgggataagtacgcggagcgccaccgccccgcacctgccgaggagacttcgaggtgcgaggagggaccccggggcggcgcctcttttgtcctgccgcggcggcggcccgggccctgcggggctgggggggccggggggcggcgggagagcggagggcgggccctgggctcacgtgctcgctgctcagctcttaacccggccccgccgccccgccgggatggccgcggccggagcgcgctgagccccggcgccgtccctgccgcccccacctctccgcgacccccgcccggccccgcgcccccgccccggctccgcagctggcgcctccccacccccgtccctgctcccgccctccccgcgccgctggcagccgcagcccccggaccgggaggaatgagcgagccatgaggctgctgcggcgctgggcgttcgcggctctgctgctgtcgctgctccccacgcccggtgagtgacccccgcccggccccggcgccccctccctgcccccgccccgggatgtgcggcgcttgctgctgcagccaccttttcctgcagtgctcggggtgacagccggtccggagcgcgggagggtaggggagcgggagaggagggaaggtgcgtccacccacctgtccccagctggccgggcccaccgcgtccctgcccctgccgccgaccggccagctctgcaggtctctgcgggtttgggcggatgggggggcagtcgtgacggttgggcgggagtgaagctcctggccccctccccgcgggctcttgcctctgcagggcagccagatcctcccacccggatcgccctagggctccaggggccacaccagagtgggggatgaggcatgcccaccccattcccaagtcttctgccccagggtgggcagctgcctgcagccatggccttgtttccccaggtcttgggacccaaggtcctgctggagctctgcgatgggggggcttaccccagctgggaggcccaggagcccctgaggtcacggaacccagccgtctggttagggagagctccgggggagaggtccgaaagcagcagctggacacaagggtccgccaggagccaccagggggcccggtgagtggggctgggtggtgaggccaggggctgaagcaggcctcagagccccaggaagcccacggggtaaccagggttggagtccccctcagcagctgccccgcagggtccccttctgtacagtgggctatccggtgggtgctggagcccactggtggggagcaccaggcctgcccagccccagggcccccttccattattgtagggtcccctgccctcagtgtacagggaccactaatgcctaggtctcaggtctgctttgggtcagccttccaatggccccctgctctgctctggccaaagctagttgttctgttcaaaacagggcttggatggggcaagttgggggcagggagaggcagcccagattccagtcagggattagggctctcaggttctcaccacagccaccttagtgggctttcttggaacaacttagtgcttgctcctgcctcagtttccacacagtgcccagataggcttgttgttcttcctgtcctggctgaaggtggggccttggaaaataacttgaggccccaagccagctctacctgcctgcccactgtccctttcagctgccaggcccctcctgcctcccagaggaaggttaggcatgaaggagattaattgcaattaataattaattaatatcatgtgaataataatcacccagatggaatattcattcagcacaccccagcgctccaagagctggagctgaaagtgagccaggccaacagggcagcagagggcaggttggctggcaaaggcccggcacaaacaggaggtataggggggagacccagaagaggggtacaactgaggcctgggaagttttggcagcggggagtggtgggaggtaaattgggctgggcagagggaggaaggagggaaacggaggctaacattacggacatctgtcagactggcatctggccctgcctaatgtacttggttaaaagcccttaagggaggggagcagagggggatgcggggtggtgcaggggtggagaatactgatgaaatggatggagcaggaagggagcatgcataatagatggaccatcactcagggccgtgcagaggggcagggggagggggctaatggtccaaggcccgcagtcactgggggtggggtggggggtggaagctgccttcagcaactgcccaggctccctgggaggtgtgcagtcctagggccggggatggggtgtcctggccgctgagtctggctgtcttgcctggtgtcactccctacctgtgaactgtgcaccccgtggttacactgtgggggaactgatggtctgcccgactgctgggactctggcttatgctttaagggatgtgcagattgagtcatggagggatgtcaccgcagggaaaggggacagagttgaggaaaagcctggagtcaggtagggatgaaaagtcaggtattccaactgggcaggttgctccttcagcctgaccctttccgaacagagacagaggtggcaaagggtaggaggttctgggctgtggtggtgtctgcagctgcgtgggaaggtcaggatgggtgcagttgaactgcttgggttgggggtctctgtgttgttctgcaggtgagtgagtgcatgtgaggtgtgtatgtgatccaccgattccagatacttctgaggggtgtctgagagcctgcggggagggaatggagttccatggatctgccgggcagtgattatctccaattttggggtctctctgagactgagacttcctagggccctcatggcgacctcctcaagggacttgtttggggccctctcttatctgtgcctcagtttcccctgaggtaccaaagctgtggacttctatgggccactctgccaagctttgtatgcactctacatcacttatttctcacaactctgtaaggcttgtaacttttgtgtgtttatgtgtgtgtgtgatggagttttgctcttgttgcccaggctggagtgcaatggcgtgatctctgctcaccctaacctccacctcccgggttcaagcaattctactgcctcagcctcccgagtagctgggattacagacgtgcgccaccatgcctggctaattttttgtatttttagtagagatggggtttctccatgttgctcaggctggtctcgaacttccgacctcaggtgatctgcccacctcggcctcccaaagtgctgggattacaagcgtgagccactgcgcctggcagcttgtaacttttgtcagccccattttacagatgagcaaactgaggctcagagggatgacgtaaattgcccaaagtcaatcagatcttaagcagtggaggtgggagttttctccacaccagggcacttcccagttctgcctccagggctctctggatttgggtccaggaggcagtctcccaactctgcccagagcaaggagacaaaaagacacatccagaatattttccccaacggtaaggagatatggcaaaccctcaatctcctgcctggcatttctccctggggttagagcgcttttggcctcagagccatggggtctgatggtggatccagtgtggacttgagcccgtgtgtgtcctagccagaagtaccccagctgggcattgcttggtttttgccttaacttactgccctggtttggaacttcaagcctagccggtgtggagctggcagcaagatctctggtcatgtgtcgagtccaggggcacatgctggctggcagggcctggggcgctgagctgctgtggctttgggcaggtcgtttgacttttctgagccccagtttcctgttccctaaaatcaggatggtaacatatctcagtcccacctactaccaggaggtggtgatgggaaagagctttacgtgctgaggattcctggcttgacaggggcaagggtgggggtgcgactgggacaggggaagagatatagcggccaagaaggaattagaagctggagaaattagactgggtgcattggctcacagtggccaaggtcaggggattgcttgagaccaggagtttgagactagcctgggcaccatagtgagactcccgtctctaccaaaaaaaaaaaaaaaaattacccaagcatggtgctgcgcacctgtagtcccagctacttgggaggctgaggctgcaggatcgcttgagtccaagagttcaaggctgcagtgagctatggttgcaccactgcactccaacctaggctacagagtgagatcctgtctcacacaatacaacaacaacaacaaaagaacaaggtagagaaattacaattatttactaggcctttttggggcaggcactcctttacgtggaattatttaatcttcatcacagctcccagaggtggggctgttattcccatctcgcagatggagaaacaggcacagagaggcaacgtaactgccccaagtgacacagcacttgagcacagagtcaagactgatcctcaaagcagggctctcacccagcacgctgccacctcttgctcagggctgaagggaaaagagacacagatgcacccttgccctctctttgctactgcactcaaccccctcacttctgtccagcctggaagcaggctaggcctgaggcccagagaagtgagggagcttctgggagtgcagaaacctgtggttccagggagcctgcagccgaggggtggtgcaggtcaggcaagactaccgtgtccagttgggctggttgttcactccactagggtgactgggcaagcagtaagtgagctgaatgcaatctgtgggcttatggggccacatgcgttctgacttgcagggggatcttgttttctttctttttttttttttaagacagagtctcactctgtcacccaggctggagtgcagcagcatgatctcggctcactgcagcctctgcctcccgggttcaagtgattcttgtgcctcagcctcccgagtagctgggattacaggcgtgcaccaccacttccagctaatttttgtatttttagtagagatggggtttcaccatgctggccaaactggtctcgaactcctgatctcaagtgatccacccgccttggcctcccaaagtgctggaattacaggtgtgagccacctcacccggtcttgggacccctttttctaatttgcaccaagctgctgtatgggttatgcctgcccctggggagacccagactccttgggaacaaggagagggcaggacatggggaggtgactagggtcaggggtgaggaggtcgcagacctggtacatagaagctcatctgagccagctaggggaggggtgcctcagtctctgggctaagctcttgtgagagatgcccaggccagcatttactggaagcaccaccccagaagccctccacggtgggtgtgtgctgcaacagtgtttgtgttttcgtcctgcagaaaggcggagggcagttgagtaaggctcacccccagctcttgaagatgggagtcatggacatggtgccacaggggggccagggtctgtgcctggggccctggtaccccactagagccaaggccatgctatagtctgtgtggctgaagttgcggctctctcctgggttggggcagatggctagaagccagggctaggattttgctgggcccagcttgttcccaggggtgaggtgggggcatgaactgagctctgccatgccagagagttcagcaggcttagttttggtgtgagaggctgcacgctgtggctttgaggtggcacagccttagtgcaggtcctgctcccctgcttctgactgtgtgacctgagccagtcatgcagccccctgaacaccaccttcctcattcataaaatggggatgctcatagtctccacctctcaggctgctgcgaggacttgagatgatgaatgtcaggtgtccagcccaagatctggcagaagagccgatggtcaacatctctgagtgtccggacagggtgctgggccctggtgctggcatgagggctgggtgtcagaaacaggagccaggatatttaggggttacttgtcaggctcggggtggggtccaggggagaaaccacatgagcaggactctggcctgtgggcttggcctcacccaagcaacctcctggctgcctagaggaacccagctgtccagagtctgtccccagagggactgatgaccctgtaaaaggaggtggctctgttctcaaaaatgtaggtcaaatcccatcattggaaatttgtctggctgttctcattgcctgggaatcccgctgccctcttgataaatggagcacccaacacattgccgggggtgggtggggggagctggcaggtgggtgggtgggtggggggtttctcccagctgggacatactcccaggtggagctcctgcctctctggctcctccccactctgcagccacctggcccacaaggtggtggtgtctccttgcgggaggggattccagaaagatgtcctcaggtgagacacctgacaggtaaatcacaccatccacccagatctggagcataaggctaccattctggcatgtccctgtcacagtaggtgatccaaaggagtcgtttatgcagttcctcaaagccctgttcagctggaacatttacacttccttctcgttattattattattgacccttatgataccacatttaaaagggcttttatttaatcctcacagcaatcctggtttttcttttcttttctctttttttttttttttttttttttgtagagacagagtgttttgctgtgttgcccaggctggagtgcagtggcacgatcttggctcactgcaacctccgcctcccgggttcaagcaattcccctgcctcagcctctcgagtaactgggattacaggcacatgccaccacacccggctaatttcttttttgtttgagtagagacagggtttcaccatgttacccaggctggtctcaaactcctgagctcaggcaatccgcccaccttggcctcctaggattacaggcgtaagccactgctcctggcccaacaattctgttttaccgaggggaaaactgaggccgggggcatgaagcagcttatctcaggccttgcgatacatttccattcaacgtgagtgttgagctcgtgggcagggaaaaaaagcaggcatcgcccttgctccagggaactaaaggtcgcccacctgaaaagccaaatcagtgatcaaagaagtgtatgtctactgtgtgcttaaaggcccagaggtggagggcgccagagccctgcatgggttggcaggtgcaggctgtgcagatgagggtggggaggagagggaggtccgggcaggagttccgggtcagcgtgtgaagggccgtgtctggaagtggtggggagcaatggtctcccttctcgaatttcctggagaatttgagaatcctaaggctccttagtctctcccttcctaagactgtgtgtctgtaggtctggggcagagcccaggcacctgtatttgtgcttctgggtctttggcagaatctttgcctttttctgtctgcaccccgcatctggtacagagaggacaaggcacagtcgctctgaagcagatgtctaggagagtgggtgggccagccagagaggagcctcgggtggaaggggtggtcacccctgccaggcagtcacagctgctgtggcgacacgaactccagccccagggtgagatccagccccacacctccccagccacccagccatgaccctgggccagtcacctccaggtgtctccctgagcctcatcctggcatttgtaaaatgaggaccagacagcctgggcacgttgagatcaaatgagctggagcatgtgagagcctgggcagccgggggagcaagagacaagtgcagggcacagggtcagctgagggctggcatgacctcaagaccaaaggcccctcccaccagggatggagggacaatgggatgaggtcagaggcagggcaggggcagaaagcagggccaggcagggagcacagtttggctttgatagagcactggcttaggctggacatggaggctcaagtctgtaatcctagcactttgggaggctgaggcgggaggatggtctgagcccaggagttcaagatcagcctgggcaacacagtgagatcccatctcttaaaaaattaattaattaattttaaaaaaagaacattcgctgggcatggtggctcacatttgcaatcccagcactttgggatgccaagggtggatcacaaggtcaggagttcaagacaagcctggccaagatggtgaaaccctgtctctactaaaaatacaaaaaaattagccgggcgtggtggtaggcacctacaatcccagctcctcgggaggctgaggcagagaattgcttgaactcaggaggcagaggttgcagtgagctgagattgcaccactgcactacagcctgggtgatagagtgagactccatctcaaaaaaaaaaaaaaaaaaaaaaagaacattggcctaatgctgggcgggcttggggcggtcttgggactctgtgccagcaggagtcccctccccactccccaggtgccagggccacagagattctggggactgagataggtttgtgtgacccatctcttccctcagaccagggacagggttgtgtccccgcatggggccaggccaggcaaacaccccttggtatgtggtctctttctttctcctaccgcctttgggggctctcccagccccctcctgggccacctccagccaggcccagcccccagccccagctgccccggcactgccccaggggcttatctggtctgagccctgtgtcctgctgggctcagctgcaccagatggggaagtggtgagagctcagcaggtggcaggaggtggtggacaaggaggctcttaaggtatctggccttcatcccccatcagctggggctttccccagagtggggactggcttggcctctgcagagaggaagcaggcttgatggggtggctcgcagacctcctgagtgagggagattctgttggtgccagggcagactctgctggaatctccaggcccaggatggtaccaatacgtagccaacctcctggcctcgcatctgggctcatctgaccattttcagtgggaaaatctgaggcacagagaggttgctgggtcatccctggggctgcacggtcagagagcagcattggggcaaggggtctggcaggctgctcctctaggcagctgtggagggggctggcataggggcttgttggtgggaggcagatagaacaagcaggaacagtcccaggggcaggggaaggccaggatggttcaggccatgggccgggaagaggatgtggcgactccttgtccttgactttctatttcgggctgatcaatgctctaggggctcaggatggaattgggagccttggtcagcctggaatagggtgagtcggtgtccttggggcgcaaaggtcagcccacccaggccctggccgttggtgccccccttgctcctctcccaggacctctcatggacactgggccctcttccattttactccacctttggggtgagacagccctagaagcagactccctagcttcaccactttttagctgtgtgaccttgggcaagttagtcagccccactgtgcctgtctcctttcagatgggaatggcagtaatctatcccatagggttgctgcgaagatcaaacagggcaatactcttagtgtttagaccagggcccggcacacaagaagtgctcggtaaagattagcagtgatgaggtggttgaggaggaagccgacaaggcacaggctatggatttcatgaccacaaccttggggctctcttccttcctgcaacctgccgtccccaccacaaaggccaggcagcgaacaaaagcctcccatttgcagggcagagtgggtgaccctcatgttggggtctggagtcagtcttctggaatgaacaaggggtgtggagaaggccccagccctgagtcctctcagcccttcctgggccctgcggttgctgtgatccaggcgtcctcaagcgcccaggcctggggggccgccatcttgctctggcgtggtgtgttgctgtggcaacctggagcctccagccccactgcactctgaaaaatttatcaggaaaacttccatgtttaaaaattaaccatgggattgaaatattaaagatgagctgctttgggtgaggcagagggcaatggatttgggggtagaggagccaagtccttactcccaacaggatggcacctgcccgtcgcccagtttccaggggcctagccatccattcccacccattcgcccctgtccgaggcctcctatgtagatggaggctggggccggggtagggggacaggcagcgagggtcctgcctcccatttcctgtttgtccctttcccatgatactcctggggccctcccgttactctgcctgatggtggggtgcccctcaccagccaggagggcataatgaggcagagggctggccgggctgcccctctccatcccagctgcacctgcagcccagccccagagaggatgcacaggtgcccgggcccagagggcagaaagggggctgtgcccagggctgagcactcctgcctctgcccactagtaaaggagcagggtcgtggaggaagaggagcttggacaaagcatcttgcccccaaatcaatggtcccctcagctgctagggctggccaccccttccccagggctactgttgctcccgggatccccccgactcccaccttcaggcctccctgggttgactccccctctgccctccccccacccagcctgtccatctggcccaggtgagtttcgtcatcccagccttcaactcaaacttcaccctggacctggagctgaaccagtgagtgtggccttgagcccaagaggaagggcagtggtggggcgggggagacatggctagggcctggctgctgggggtctgggggttgggcctgggcagaggggacctgggtcctgacctgaggcgagcctcaagcccgacctcacctcgcccgtgaccccccttcctgctgccccctctgtctcagccacctcctctcctcgcaatacgtggagcgccacttcagccgggaggggacaacccagcacagcaccgtgagtgccactgcaggggaccggggccggggatggaagggaggtgctgtttctgtggttctgtggtcacaggtgtagggacaggtggccactggagatggggtcctgggcctggcccctcagcaccttccctctctcccgacccaggaggctctgagggtggacagtgggcagcttgagtgcatagggccctgaagtcccctcacttggccccagagctctgacccccagccagcccacgtggggcctacagggacactcgttccgagcaggctgccaggaatccccctctccagactcttctgagagggacagctgaggaaaggcccttcttactcaatatcaaggccccgaaaatcccagctgcctgggacactagggtcccagccctgaaggctctagagcctgaaaatgaatgagtgtctataaatagcctgtctcccccccccccgcccccactgcctgttcagtaactggagcacaagtaattctgcaggaggcagagctggagcgggagggtgccactggtccccccagccccaacccatgagtctggccaggaggacacatgctgcccatcactcctcagccaaccacaggcccaggggtgtcctgggaggcagtgcatgaggttgtgtgtgatgttaggggcgagtacatgattaaatgaggtaatatatggttagtgccagagcagtgctgggtacatggtaggtgctaaataaatgttgcctgttattctcaaaggagtctgatcccttccccagccccagcaaatggctaagaacccttgctgtacgctgggctcctataatcccatcactgggaggctgaggtgggcggatcacgtgaggtcaggagtttgagatcagcctggccaacatggtgaaacaccatctctactaaaaatacaaaattaaccaggcatggtggtgcatgcctgtaatcccagctacttgggaggctgaggcagaagaattgtttgaacccgggaggcggaggttgcagtgagctgagatcatgccattgctctccagcctgggcaacaagagcgaaactccgtctcaaaaaataaataaataaataaatacaaaaattagctatgtgtggtggcacatgcctgtaatcccagctactcgggaggctgaggctaaggcatgagaatggcttgaacccaggaggcagagggtgcagtgagccaagatcacaccactgcactccagcttgagcgacagcaagaccctgtctcaaaaaaaaaaaaaaaaaaccattgctacagtccagcttcctcattttatagatgacgtgaaggaggcccagaggttcctaaccccagagggctaggaacttgcccagggtggcacggcaaattaggagcaccagccatctagaaacaggctccagagccccaggcatacccagggattgtggccacctgcacacagggcagcttcagtgtcccccaaaaagccttgaggcccattggctgcccccggcctcatgccagcgttctgctcactgttctgctccttcagggggctggagaccactgctactaccaggggaagctccgggggaacccgcactccttcgccgccctctccacctgccaggggctgcagtgagtatggggaggggccgggcagctgggagaagcctctggcccaggcctggggacggaggggagctgcgcctctctctccacagtggggtcttctctgatgggaacttgacttacatcgtggagccccaagaggtggctggaccttggggagcccctcaggtaagccccacacaaccccttgccatcctctctggtggccctgccaagcttgtcccaacagctgttgctgccacctcttcctcctccggctcctccctcagtaaccccagcctcactgccctcttcagtgaccccagctctggttccctccctcctgtgccccagctccccctgtgcccccagctccaatgtcccatctgtcccataagtgacctcccattgggctccaatgtcctttgcccctgtctctcagggtgcccccaggtcttgaccccggaatctgagcatctgggagatcagatccgacatgggagctgtggccagttctgggtcaccccagggtggggtggaggcgagggctggatctggcccccgccaagtgggcctggagcaggcccagttggcaccccaagaactaatttcccctcattgcagggaccccttccccacctcatttaccggacccctctcctcccagatcccctcggatgcagggaaccaggtaagggagggaagggggggtggggaggggccggctgtgcccccctcacctgcccctccccacaggctgcctgtttgctgtgcctgcccagtcggctcctccaaaccggccgaggctgagaaggaaaaggcaggtacgggggcccgcacagacctcgggctgcagagacctcgggctgcagagagacctcaggccgtggcccagagcaggagggcaccctcatctatggctggggcgaaggaaggctcagatggatgtggctgggggccagggaccgtgtctgggagaagcccccaccccttccctaatgctggcatctacagaggccccatcctgggcaaaccgaggctgcctgccctcattccaaagctgaggaaggacaggaccctctgccagtggggagctggcactgtccctggctggagtccagacccccccatccccaccgagtctgttcctggcttggccatgagatcagtcagacatggaagggactgattccaagtgcccacccaccccccaggtccgccggggccaccctacagtgcacagtgaaaccaagtatgtggagctaattgtgatcaacgaccaccagctggtgagtgccagggcagggacagggcgtgacactgggaggcccctgaggagcctggccctcctcccattcttctctctcccagttcgagcagatgcgacagtcggtggtcctcaccagcaactttgccaagtccgtggtgaacctggccgatgtggtaagcagctctccctccctcccttccctcctcctcatgccccccaccccaccacacacattagggggcactgtcagcccctggctcccacttcctggagagaacagacaggccctcctccagccctggccccaacacccactcccaccctccagccccctcatcttctccccagatatacaaggagcagctcaacactcgcatcgtcctggttgccatggaaacatgggcagatggggacaagatccaggtgcaggatgacctcctggagaccctggcccggctcatggtctaccgacgggagggtctgcctgagcccagtgatgccacccacctcttctcgtgagtcccccaccctgcacctcctgccagcctctgctagttgctacagtgcttgggattacttaacacctgccctgtgctggctgctcctctcagagtctggggactgggctcaccttgcacctgccacctacccccagccacatgcaacagctgggcatcatcccctgaatctgaggttgatgcccttgtcttagccctggtggtcctcttctgcctctcacctccccttagttctgtctttcccctttcaaactgtcccagcatcccttcctcagggacccagtgccctagtagggaaaaaaatctaataaaagggccttgcaactagagatggtctactgggagcctctcctttgccttatgggcaaaagaacccaaggaggggccaggcgtggtggctcatgcctgtaatctcagcactttgggaggccaaggcgggtagatcatttcaggttacgagtttaagaccagcctggccaacatggtgaaaccccatctcaaaatacaaaaattagccaggcgtggtggtgtgcacctgtagtcccagctactcgggaggctgaggcaggagaatcgtttgaacccaggaggtggagattgcagtgagctgagatggtgccactgcactccaacctggaccacaagagtgaaactctgtctcaaaagaaaaaagaaaaagaaagaaaaaaaagaacccaaggagggggggaagggtcttgcctggggtcaccaaggctgatgtaaagggccaggctcacctcctgaggaaggactctagtgtgaggggctccccaaggccccaccaccacccggggagccacaggggagggcaggaggccatcctgacagcgcactcccttccaggggcaggaccttccagagcacgagcagcggggcagcctacgtggggggcatatgctccctgtcccacggcgggggtgtgaacgaggtgagcagtggggggacatggctggggtggcggctgagggaaaggggcttcaggggcacgacgtgcctgttggaagatgtagacatctgtgccccatcttccccacccccagtacggcaacatgggggcgatggccgtgacccttgcccagacgctgggacagaacctgggcatgatgtggaacaaacaccggagctcggcaggtatcctcccccagaggcccccgtgtggcccacgcccagcagctctggaacgggagggtgacagtgggaggggtggtccttggcctccctcatatccgcctggctcacccctcaggggactgcaagtgtccagacatctggctgggctgcatcatggaggacactgggtgagttcttggggacaaaccgggggaaggtcttgggcgaggggagtcttagagcgagcattgtttggcagtctggaccagggggctcaagaggcccagctcacagaaccactcaggatcccaagaagcccagttttccgcaaacactgccccgggagacccagatttccctgctgggacaccaaaaccggccaggctgcagtgcgcatcgtggccactgggcgccgcccaagcctcgcatggagacaccttccctccagcgcggctgcgagtccccaggttcagcggaggggatgggagcgacagggacaggcgggaggattctggtgcaatcccggggcagatcctccgcctcctcgcgatggtgacgaagtcccccagtgtaccccctccccagccttgagaggggtgagggtgggttggaggggagcagccagcagcacctcccctcgccctatccaggttctacctgccccgcaagttctcgcgctgtagcatcgacgagtacaaccagtttctgcaggagggtggtggcagctgcctcttcaacaagcccctcaaggtaccagccccgcggcggggagcatgggagcgggccctgggcggggtccgggccagactcccgacctgtcctcccggtccagctcctggaccccccagagtgcgggaacggcttcgtggaggcaggggaggagtgcgactgcggctcggtgcaggtgagcggtggtgcgggcgccaggtggggaaccgggatgcgggggtgggcacgagggagcgtctgagtgggaggattagggctcgcccgcctccttcccctcctcccgcgtccctcaggagtgcagccgcgcaggtggcaactgctgcaagaaatgcaccctgactcacgacgccatgtgcagcgacgggctctgctgtcgccgctgcaaggtaagcaggaccggccgggaggcggggccaggacgcaggaggagcgattggaggccttcatataaggggtgggagctagggagggaagcggagccttcggggacgaaggcctctggggcagggcttgatgcgaagacagcgccaatggggagcaaggggcggggctgaaggatgttgaaggcggggctacgaggagcgggaagggaaggctgcccagaatcaaggaggggcgggaaggtgggcgggcttgggggcggtgctgagtgcgctgggagcgaggtggggagcgttcaagaggtggtgggagcagggaaataagaacaggcctgaaacggggccctggggagctggagggcccggggatgtgggggtccagagagcgaggggcctggggagggcagggccgaggcatccatcctgcctgactcgaggagcgcgtctcttccctagtacgaaccacggggtgtgtcctgccgagaggccgtgaacgagtgcgacatcgcggagacctgcaccggggactctagccaggtccgcccggccccgccgtcttgtggagccctgggcgaggcaacccctacccttgtcgatttggttttcccggacgagtgctcagcactcccctcctctccacagctggcatcgacctccactgatcagactgttttcttatctgagaaaggggttcttcatgctcctggccttgttccttcaatcattaaaccagaatgtatcgtctggctggtattcccagcgcctggcccggtgcctggtgtaggttagggatcagagtagacgataatattagttaacatctattacaacctaattacatgccaggcatttatctcccagccctacgagggagggaggctggagcggctctggggcttgcaaatccgtgtggtctgggtccagaaccagacagatcgcttgtcctaggcgtggaagagccctgtggcatgagcccccaatggggggcacttggtaccccagcattcctccctggggcagccctcagctccagtcctgggactgctccgctcaaccccacccctctctccacagtgcccgcctaacctgcacaagctggacggttactactgtgaccatgagcaggtatgatggctgccccctgagcctgggattcagggcagtctcttgtctccactctgaccactcagcatctccatcccttgcctcttaattcttggactctcagggccgctgctacggaggtcgctgcaaaacccgggaccggcagtgccaggttctttggggccatggtgagtctggctagggctgggagtggggactccggaggacccagagctgagaagctggggagagtgggttccagctgaacaggcccccaagtgtgtagctccccaggatctcagggacccaggcagagtgtgggagatgcaggcctgaggtcttggggtgggtcctggggcgcgtggggtcacttggcatcctctccccacagcggctgctgatcgcttctgctacgagaagctgaatgtggaggggacggagcgtgggagctgtgggcgcaagggatctggctgggtccagtgcagtaagcagtgagtactgaggctcccagagggcctctcagctccagggcaggtgtgagacttttcagagatggggcagcaggttctcccaggaggagcctgtcagtcccaatgggcgggcacgtggcaaatgaggtggcagggtgcagggtgagggcagattagagttcagtagttgagtctgaggtcaaacttggggctcactgtctctatatgccccaacagggacgtgctgtgtggcttcctcctctgtgtcaacatctctggagctcctcggctaggggacctggtgggagacatcagtagtgtcaccttctaccaccagggcaaggagctggactgcaggtgctggccaggaccaagactagggaggggaggttgcagctgtgctgggggttaggagacagggggctgaggctggctgtgtcacttccccaggggaggccacgtgcagctggcggacggctctgacctgagctatgtggaggatggcacagcctgcgggcctaacatgttgtgcctggaccatcgctgcctgccagcttctgccttcaacttcagcacctgccccggcagtggggagcgccggatttgctcccaccacggggtgactgcctggagcctgggatggcgggagaagcttacaagaggggacaggcccctgctcacctctcctggccctgccctgcctctaggtctgcagcaatgaagggaagtgcatctgtcagccagactggacaggcaaagactgcagtatccataaccccctgcccacgtccccacccacgggggagacggagagatataaaggtgaggctggagctggccgaggggggtctgtctgtcctgctctctatgcctgtccttgccagctaagccctgccatcctccccaggtcccagcggcaccaacatcatcattggctccattgctggggctgtcctggttgcagccatcgtcctgggcggcacgggctggggatttaagtaagagacacacacaccctgtgccccctggcatccttgaggggggatcagaatccctactggtggagctgagggggccctccctgaaagcccaactgaaccagagctcacacgtcataggtccaagtagcctgcagggcttaacatttagaaactaggagattttaggctagatgaggtggctcacgcctgtaatcccagcactttgggaggccaaggcaggcggatcacctgaggtcaggaattcaagaccagtctggccaacatggtgaaaccccgtctctattaaaaatacaaaaattagccagccatggtggtgcgcacctgtaatcccagctacttgcgaggctgaggcagagaattgcttgaaccggggaggtggaggttgcagtgagctgagatcgcaccattgcactccagcctgggtgacagagcaagactgcgtcaaaaaaaaaaaaaaaaaaaaaaaaagaaagaaagagagaaagaaaagaaaagagaaaagaaatcaggagattttacactagcaattcggatttccagctctggaaacatgaaaaggttgagccccagcgtgcctctaagcatccccaaatagccacagagtggagctgggcaggggccacccaagccaggcatgtgtcctccagtctccagtccccacccagcctataatgctttgtgcgtgtctaagtttggggtccttgtgctggtctaacccccttaatgtgcagaggaggaacccatggcccaaggtcacatgattgagttagtagcagagtcagagctggaaccgggacgcatttttgtgggtgccctgggtaattctccctggcccttacattagtgtccaggccccggggaccccggccccgctctggggcaaggggtcgcatggcagccaaaggcccctccctgagagaagcaaaaggtcagatgtctccttttcctctccccttccaccatcctccccctgcagaaacattcgccgaggaaggtacgacccgacccagcagggggcagtgtgatgccggccacgtcatccctcccgctgtccttgtctcctccatctcattcgtcaccccgcgttctgttgatggggagcgggggctgattcccccacccctgctgccaggctgtcccggcaggggtgggagagcctcgctcagggaagaaggtcccagctgccctcgccctcgcccgctcaggccacgtccttctcgactgccctgctgcggccaggccctcccctgccaccaggtggaactggagctgcgcccctggcagtccccatccccgggagggccctccctgtgcgtcccatctgttttgtcttccatatcaccactgtctgacctcccgcagatcccttccctggccagcctgtgacttgccgcctgcctccagggcccagcactgagctccggggccctgctggggggctctccccgtggcccctgctcacgtcctcccctgatgccccctctccgttccaggtccggaggggcctaagtgccaccctcctccctccaagcctggcacccaccgtctcggccctgaaccacgaggctgcccccatccagccacggagggaggcaccatgcaaatgtcttccaggtccaaacccttcaactcctggctccgcaggggtttgggtgggggctgtggccctgcccttggcaccaccagggtggaccaggcctggagggcacttcctccacagtcccccacccacctcctgcggctcagccttgcacacccactgccccgtgtgaatgtagcttccacctcatggattgccacagctcaactcgggggcgcctggagggatgcccccaggcagccaccagtggacctagcctggatggcccctccttgcaaccaggcagctgagaccagggtcttacctctctgggacctagggggacggggctgacatctacattttttaaaactgaatcttaatcgatgaatgtaaactcgggggtgctggggccagggcagatgtggggatgttttgacatttacaggagggcccggagaaactgaggtatggccatgccctagaccctccccaaggatgaccacacccgaagtcctgtcactgagcacagtcaggggctgggcatcccagcttgcccccgcttagccccgctgagcttggaggaagtatgagtgctgattcaaaccaaagctgcctgtgccatgcccaaggcctaggttatgggtacggcaaccacatgtcccagatcgtctccaattcgaaaacaaccgtcctgctgtccctgtcaggacacatggattttggcagggcggggggggttctagaaaatatagttcctataataaaatggcaccttccccctttcaagaagggtgattctggggccgactcagggtttaggtgccccctggtgtggcctagatgtccccacctgggccatctttctggggaggactctcccaggtagggaaggccagaggtggcccagtgcctggagggttagggtctctgcctgggatatgcaagaggaagtaggaaagggaggtctcatggatgatcctaggctgctagaagtccttaaggccccatctagtccattccactccctacccccattccagagccgagtagtaagtttacagatgtttcccccattacgtacccccacccatccctgctgcagcgagcctgagagccaggtagagccaggcacagctcctcagtcttctcacacagtcctgccggtggccttccctcatgacccttgcttgggagggtggagcactggctccttgaccctaaaaggtagctggcaggggcaagatgggggccagctacctaatggatgaaagccacaagtgaatacagttcttgtcaccagggttgccctgccctcactcggcagggagttctgacaccccagggcccgtgagctacctgcttgagcccctgtttctggggcaccttcgaggaggcgttgtggagggcatcgccccctgtttattcacaacaccctcaggggcaaacaggcctgggacccgctgacaccattttgggtagctggatgcacccgacagcagtggggtccacacactgagctccagctggcactgcccactcaagggctgagtggaggggcccctccggccagctctgctccaccagccctgcaagctgatgcagggcgggggaagggctgggtgttgcactattgctgcgctgccttaaggcatctgtcctctggtggtgcacccgtgcacacaggtacagtgcatctgggcacagcttttggatccacacctctgcacaagtgtgaatacctctgcacatatgggcgtatctgtgtgtgctcgtgtatatggggtggggaacatgagacttcctgtgaccagtccaccctggctcccagctgtctgtatcctcctgccccgccctggcgagtgcctaccctggcagaacccagggaggagtggaggctgcctctgcctgggcctccacacagcatcctgtacatacgccacctgggctgggggtggggaggcagggccaggagcatcgattaaagatcacatcctggggcttccagggagctcacaccaaccttgcgtttctctcctgtctgtgaatggccatgctgtgacttgtcccctctggctcaggagggagcatgataactggggtgctggaggcgggaagggagcgcccaggaccagctccattcatggtgaggaaacagggtggaggcctggccctcccgcttccgcttcctcgcttcctcggctcttccaacaaagacagttgtgcccctcctctggctccagcaaagcaggaggccaggcgagtaggaaagcattttcccaaaagtctggagacccaacttcccttttatggctgaagccaaagaagcctctcctcacctcccaaaagattccagaacgctggacaaaaccattagcctgtctggtcccagggcaccgtgttcctgggctcttttcccacccctgtgctctctggccgagcctggggcaggaggggactgagcaaggctagtgctgggagtccctcccctggctggggctgcgtctgagccaggagcctgtaatgattattcctgtcttcccctgcagagtgcttgggcctggaggtattcgcagacttggggggccgggaggaagaactgggggaggatccatcgggctctggaagtcccgcttgttaagggaaaagataaaagaagcagttgggggcagggaaacaaatgaaaggctagaaaaagatggagaaagaaatagcagcaccaagcaggggcctgggaagaattggcagctagaagctttgggatcatagccccccattcctgaacaggtagggttcccaaggccacctcggatcacatgccgaaagagtaggacccagggccacgttcagcttagattcctactctggcatctggtcgccgcaggacactgggtaacatctaactccagtctctcctgcagcagaaggtcagcttcttcctattcagagtgcagggggaaaaaagcaagaatcattctcaaaccgatcagtcacaaactgaagtctagctgtgcccttgtcttccttgctctaggctgaataacattatttttaactttctttttgcttctgcctctcaactcctccatgcccatgcttaaccctttctcagttcccagttcccagtctatccgggtctgatgtgtggttcagctgaccctccagatagggaaagggtggcttctggcagatgaatggcaggaaggcagagagggcacaggtgaggctcagcctttgtgactctcaaaggtcagtgtaggccgagcgtggtggctcacgcctgtaatcccaacacttgggaggccaaggcaggtggatcacttgaagtcaggagttcgagaccagcctggccaacatggtgaaaccctgtctctactaaagatacaaaaattagccaggtgtggtggcgcttgcctgcagtcccaactacttgggaggctgagagagagaattgcttgaacccgggaggcagaggttgcagtgagctgaggtcacaccactgcactccagccttggcgacagagcaaggctctgtctcaagaaaaaaaaaaaatggtcagtgcagagtcaccagatgcctctcagcctcggaccaaaccctggagccctaagtgtcccctgcgtgggtaggcaagcggatgtcagagaggcaccgaactctctgcctttgtcttgcctgcctagggatgccagttcaccttttcccaactggccaggaggaaataaagctccacaggttggagtggagaatcagatctggcccaaacagaacatctgaaaagactgactttggtttcagaactggttatcggcagctctgatggagtgattcctaaacaacatgggtggaaccaggaatttgaaatttgcagtgaaggccacctattgcaaggaattcccaggaacccttatttttcaaaagtagaaattcctttggccaggagcagtggcttatgcctataattttattactttgggaggctgaggtgggaggatcacttgagtgagcccaggagttcaagacctgcctgagcaatatagtgagaccttgtctctacaaaaaactttttaaaaattaaccggccgggcgcagtggctcacacctgtaattccaacactttgggaggccgaggcgggtgggatcacgaggtcaggagtttgagaccagcctggccaatatggtgaaatcaaatctctactaaaaatacaaaaattagctgggcgtggtggtgcatgcctgtagtcccagctactcgggaggctgaggcaggagaattgcttgaactgggaggtggtggttgcagtgagccgagatggtgccactgcactccagcctgggtgacagagcgagactctgtctcaaaaaaaaaaaaaaaattcgctaagcatggtggtgtgggcctgtagtcccagctacatgggaggctaacacagagcaagactctgtctcaaaaaaaaaaaaaaaaggaaggaaaaagaaaatctttggataaaatcaccattccaggttgcctccgaatcatccccctcacccctcacttttttttttcttttttgtctgtcgcccagtctggagtgtagtaatgcatcatagctcactgcagcattgaacactggggctcaaataatcttcccacatcagcctcctaagtagttgggaccacaggtgctggccatcatgcctggttaattttcttcttttttttcttttttttttttttttagactgagcttgctctgtcaccctagtggagtggtgccatcttggctcactgcaacctccacctccagggttccagggatcttttcacctcagcctcccacgtagctgggattacaggtgcgtgccaccacgcctggctaatgcctggccaattttttttgcacaggggctgggtgcagtggctcagcctataatcccagcactttgggaggctggggagggtggatcatgaggtcaggagttcgagaccagcctggccaacatggtgaaaccccatctctactaaaaatacaaaaattagcgatgtggtggcgggtgcctgtaatccgtaatcccagctgtaatcccaggcaggaggattgcttgaacctgggaggcggaggttgcagtgagccgagattgtgccagtgcactccagcctgggctacagagcgagactccatctcaaaaaactaaaactaactaaataaataaatctaatacatccaaaatattctcataccaacatataatcaacataaaataattattgagatggtacatcctttttttttttgtacaaagcctttgaaatcagggatgcattgtgcccaatttcaaactcagcagctacatgtggctattacagatactgttaagaagcaacatttacatccaggaagctttgaaagaaggaaaggacagaagagaaaacagacaactatgtgtgaaagacttaggtcaggagcagcagacactgcctccttaaaggtcagagggaacctttgtgtatagtcctttctagaaggcaagagatggccgggcgcagtggctcatgcctgtaatcccagcactttgggaggctgaggtgggcagatcacgaggtcaggagatggaaaccagcatggccaacatggcgaaaccccgtctctactaaaaatacaaaaaaattagccaggcgtggcggtgcgcacctgtaatcccagctactctggcggctgaggcagaagaatcgcttgaacccaggaggcaggggttgcagtgagccgagatggtccattgtactccagcctgggtgacagagcaagactccatctccaaaaaaaaaaaagaagaagaagaagaaggcaagagacaagtcaggctgatgttggcaggatcaaggaattttaacttaatctagagtgagagacctagatttatcctgccctgaaaggggctctggctcccaggaacttgctttaggcaaaagaagatttctgtcaatctttccagaagatcagcaggagagagaagcagctccagcccaaggcttcatgctgaggaagattcttgaagactttcagctgagcccagaaacccagtgcctgcggcctaggctcttcaggcctttggtgttgaaagcaaaggtgggaaataaacaccagtcagtggatcatgtcctctaagaggccaaagccgttacaacctggagaccacccctggcgacagctcctgaaatgtgccctgacagcccttgccatgcgcaggagtccttaggaggcctgttcaccaccgagacttcgccaagtccccatgaggttgatgaggccatgaagccatgccctccacctcagtcacaggcggcattccaagtcagctatcaggactaagtgccacttggctcctcagaatgctgacagtgtggccaggcacagtggctcacacctgtaattccagcactttgggaggcggaggcaggtggctcacttgagctcaggagctagagaacagcctggccaacatggtaaaaccccgtctctactaaaaatacaaaatttagctgtgcgtggtggctggtgcctgtaatcccagctactcgggaggctgagacaaggggattgcttaaacctgggaaggggaggttgcagtgagccaagatcatgccgctgcactccagcctgggtgacagagggaggctctgtctcaaaaaaaagaacaccccaatgcaagaggcccaggggccttcagagcgtggagagcagcaaggggtccccaagagacacctttgctttgcacaaggctattcacgtggcccatctgactacaggaggagaccaagcctgggccaccactgggtgcaggggctaggacagttatcacttacactggctccatgtggccccaggggcagcccagcctgaggtctccactcgctacactcagtcctccaggcctggctacctccttaggccacgctggtgttggaccccgaagggttaattgctgctgccctcacccccacagacccctctgttcagccctggccctccgccacctgaacccctgcccgcttggcagcctcaggcttcctgacaagtgtctgaccggctgccaatctccactctccccaagagccgtctgcttctctctggcagccgcggtgcccacttgggtttaaaaataaactcgctatctgcctttcctccagcagaatcccaggcacttcttccatgtggagctggatcccagccgcccccgaaagcaccatgtcgccgtcatctcagcggcccctgcgaggaacacgttctacgactccattgtagggactttgctgcagaaaactccattttattgtggggcacctgtcacttctcccatcatttctgggtggaggatataagtgcaggagtggggtagaggcgtagggctgctctaaggggtatgggggttccaggatggctcagacaggtgtctctgcaaaaccagcatctccagcctcagtggggcactgtgtggccttcacacccacagtgcccggggttccctcccctcttcctgccatttaatttctcctcctctgctctcttcagaactcaccctgtcccaccccttttctccctgatggcctcttccctcatgctcctaggagaaaggccagctcccaagctcccagcttgcttcttcccagcaccttcaggctcttccccaagggctaatccctcccactttgcttcgagcccctgcccctcgtaccacttcaggccatggttctgccatttaccaatcctctcccccatgtttcctgctccttcccataacccagcccttttcacccttaaacacaaaccaccaccccaaccacccccagccccagcgcctccgcagccccactgcaccctggcactgccgctcccactgccgccgctcccactgccacagttcccactgctgtccggtccttggggcaaacaatgcgggctgccaactccaaaccggcctcctgctcatgccaccacctgctccagtcttacaggctgagcaccacagaccctcctcccagcgtggctgtggccagagctctggctcacctgccccttccctgctcgcctctccagcccgtttcagcccatcttccccgctaggctcctgccttgggaatttctttctgttcctgttccttgaaagctgtcacccttggaccttcccccgcatttatgatttcctcccatttcatttatttttatttatttttgagatggagtctcactctgtcacctaggctgtagtgctttggcacaatctcgtctcactgcagccttcacccccccaggctcaagtgattctcccgcctcatgtcccccgagtaattgagactacaggcgtgtgccaccacacctggctaatttttgtattttttgtagagatggggttttgccatgttgcccaggctggtcttgaactcctacattcaagcaattcagcctcccaaagtgctggattacaggggtgaaccaccacttctggcctccagcccactttatatgactaactcctactcatctgttaggtggcaatttatccatcactgctccagaaagccagcctgggtgagatgcctctgccctgtgctcctggcgcactttctgatcagttccctgggtccaagcacgcagcaccctgagccctgacagcctgtccatccccctcagcagcgtcggccccttgaagagtgggacggggtctgcctgttacagtgtcatagttccaggatggaatctggtgcctgcaacatgagtggtgcttaataaatgcttgtggagtgaactgctcagtgctacacgagactagaacaaatgggcaaatgtaaaatgggaccagaaaatccagactggctcacaactgtttttacttttattggttcttttatttttatttatttatttattcatttatttttgagatagggtcttgctctgttggccatgcagtggctccatcatggctcactgcagcctcgacctcccaggctcaagtgatccttccacctcagcttcctgagtagctacgactataggcgtgccaccatacccagttaattttagttatttgtttatctattttattttattttattttattttattttattttattttattttatttatttaaagacggagtctcgctctatcaccaggctggagtgcagtggtgtgatctcagctcactgcaacctccacctcttgggttcaagcaattctcctgcctcagcctcccgagtagctgggactacaggtgtgagtcaccacgcccaggtaatttttgtatttttagtagagacagcagggtttcaccatgttggcctggatggtcttgaactcctgactcaggtgatccacctgcctcggcctcccaatgtgctgggattacaggcgcaagccactgctcctagcccctattttattttattttattatttttttgagacggaatttcgctcttattgcccaggctggagtgcaatggcacaatcttggctcaccgcaacctctgactcccgggttcaagcgattctcctgcctcagcctcctgagtagccaggattacaggcatgcaccacaacgtccggctaattttgtatttttagtagagatggggtttctccatgttggccaggctggtctcgaacttctgaccttgtgattcgcctgcctcggcctcccaaagtgctgggattacaagcgtaagccactgcacaaggcctatttttattttttttgagacagagtctcattctgtcgcccaggctggagtgcagtggggcaatcttggctcactgcaacctccatctcccgggtttaagcaattctcctgcctcagcctcttgaatagctgggattacaggtgtgtgccaccacacccacctaatttttatatttttagtagagatggggtttctcgaactcccgacctcaggcaatccgcatgccttggcctcccaaagtgctgggattacaggcgtgagccaccatgcccagccccagttaattttaattttaatttttgtggagacagggtctcaatatttgcccaggctggtcttgaactcctgggcttaagcaatcctccctccttggcctaccaaaatgctgggattacaagtatgagccaccgtgcttggctgacaactattctgcttaactggagtttaaactgaaatttcagttatctttgggatgtggaggcaagacagtttcatttgagacataccccatggcacatgcacaatgtagaaatgtcttttctggccgggcgcagtggctcatgcctgtaatcccagcattctgggaggctgagatgggtggatcacgaggtcaggagtttgaaagcagcctggccaaaatggtaaaaccccgtctctactaaaagtacaaaaattagccaggcgtggtggcataggcttgtaatcccagctacttgagaggctgaggcaggagaattgattgaaccccagaggctcaggttgcagtgagctgagattgcaccactatactagcctgggcaacagagcaagactcgtctcaaaaaaaaaaaaaaaaaagaaaaagaaaaccaagcctaatgaccagtgttgttgaaaagaggctggagccagacgcggtggctcacgcctgtaatcccagcactttgggaggccaaggtgggaagattgcttgagcacagagtttgagatgagtatgggtaacatggcaagacctcatctccacataaaatataaaaaattaactggctgtggtggtgcgcacttgtggtcccagttacttgggaagctgaagtgggaggatcacttgagcccaggaggtcgagcctgcagtgagctgagctcacaccactgcactccagcctgggtaactaaatttaatatggctttcagtttttctgaaattaaaaaccacataccaatccttgttcagagaattactatataaggacacttgaaattactatccgtgtttacagatgagtaagtgcatgtgtgcatttatttttcgtttttattttttagacacaagatcccactctgttgccgaggctgaagtgcgttggcgtgatcatagctcactgcagcctgacctcctgggctcaagcagtcctcctgcttcagcctcccgagtagctgggattacaggaatgtgccaccacactcggctaattttttgtattttcagtagagatggggatttctccacattggtcaggctggtcgtgaactctcgaactcaggtgatccacccgcctcagcctcccaaagtgctgggattacaggcatgagccaccgcatccagccaatttttttttttttttttttgagatggagtcttgctctgtcgcccaggctggagtgcagtggtgcgatctcggctcactgccagctccgcctcccgggttcacgccattctcctgcctcagcctcccgagtagctgggactacaggcgcccgccaccacgcccagctaatttttttgtatttttggtagagatggggtttcaccatgttagccaggatggtcttgatctcctgacctcgtgatccgcctgcctcagccccccaaagtgctgggattacaggcatgagccaccgcacctggccaattttttgtgtgtatgtgacaaggtcttgctttattgcccaggctggagtgcagtggcgtagtcttggctcactgcaacctgtttcctgggttcaagcaattctgctgtctcagcctcccgagtagccgggatcacaggtgtgtgccaccacgcccagccaatttttgtatttttagtagagatggggtttcgccatgttggccaggctggtcttgaattcctgaacttaggtgattcacccgcctcagcctcccaaagtgctgagattataggcatgagccaccatgcccggcctaaattttttttttttttttggaggtgaagtcttgctctgtcacccaggctggagtgcagtggcgcgatcttggctcacggcaagctctgcctcccgggtgcacgccattctcctgcctcagcctcccgagcagctgggactacaagcacccaccaccacacctggttaattttttttttttttttgtatttttagtagagacggggtctcaccgtgttagccaggatggtctcaatctcctgaccccgtgacccgcccgtcttggcctcccaaagtgctgggattacaggcatgagccaccacgcccggcccggcctaaactgtgtgtgtgtgtggaaatgggagaattgctgtgttgcccaggctggtcttgaactcccggccttaaactatcctcctgccttggcctcccaaaatgttaggattataagcatgagccgccatgcccggccacatatatgcttttaaaaagacaatgctaataatgccaaatttttttttttttgagggatggagcaattattgatgtcttttggtttctctttattttctgaattgtctctattttaaaataaggaacttgtagtatcttcataaccagaaaacaataagtaattaaaactcagaataaccccctcaaaagaaggcaatggtatttacagtgggaaaaaaaaaagtcagctgggtgcagtgactcacacttgtaatctcaacactttgggatgctgagacaagagaatcacttgaacccaggaattcaagaccagcctgggcaacacagtgagaaccccatatccacagaaaaatttaaaaattagccggatgtagtggcatgtgcctgtagtcctagctgcttgggaggctgaggtgggaggatcacttgagcccaggagatccaggctgcagtgagctatgatcatgctactgcacttctgcctgagtaacagagcaagaccctttctcaaaacaaaacaaaacaaaacaaaacaaaacaaaacaaaaactaattgaactctatgtactgtaagcaggtatatttattgtctgtaaattatgcccccataaagttaatgtttagaagctaaaaatgcctttagatggcctacattcatttcaaaatgtgtattctggcacctaagttataatctttatggaagtctaattcatgtacactggcagtaggggttcctggtcaatttgcaagtgttctcttcaagacaaagtaagttctctaattttggtgccaccaatttaggatctggaggtctgtagcctgctttatcaaagacaacaattgtaatttggctgaataaatggtttgctaagcaaagagtagacatatgtatatgcttgtatgtgcacatatttctgggaagaaacggtagactgaacagtggtcacctatgaggagtaagaagactcgggagcatgggggggacttaattttctttttttctttttttgagatggagtctccctctcttgcccaggtgatctgtctcgtgattcgcctgcctcggcctcccaaagtgctgggatgacaggcgtgagccactgagcccggcccgtgttttttttttttaagacagaatgttgccgggtacagtggctcaagcctgtaattccaggattttgagaggcccaggcaggcggatcaactgtggtcgggagttcgagaccagcctgaccaacatggagaaatcccgtctctactaaaaatacaaaattagctgggtgtggtggcgcgtgcctgtaatctcagctactcgggaagctgaggcaggagaattgcttgaacccgggaggcggaggttgaggtgagctgagatcgcgtcattgcactccagcctgggcaacaagagcgaaactccgtctcaaaaaaaaaaaaaaaaagacagaatgtctcactctgtcactcaggctagagtgcagtggcatgatcttggctcactgcaacctccgccccccgggttcaagcgattctcacgcctcagtctcctgaatagctgggattacaggcgcccaccaccacacccggctaatttttgtattttttgtcaagatgggttttcgccatgttgcccaggctcgtctcgaactcctgggatgaagtgatcctcccacctcaggactcccaaagtgctgggattacaggagtgtgccaccacacccagctttttaaaaaaatcttttatactgtatatattttatctttcactgtaccttttgtttagatatgtctagatatataaataccattgtgttgccattgtctacagcattcagtatagacacacactggatgtgtttgtagcctaggagcaataggctatagagcctgcgtgtgtagtaggctacgctgtatgggttagtgtgagttctttctatatttgtacaatgacagaatcacctgatgttaagtgttgcatgactgtaacagttcccaccctgtaccatgtctcttctaggccaaagccccctccccagagcagacccctagcactccacagcaggatcacaagctggtctctggtcccagaccctgcggatccttgtcgacgcttccagtctcgatcacttcccgatggtttgaatgtgaagtcaacaatccacggaacaatttgcacttactgtttctagggcttttgcagttaaaagtgtcttcagtttccccgatcttcctgcagatgcccctgcagtcagaagctgagtctgtcccttctcccagcagcagctgggtacaggatctaacatcagtctctgcctgctgggcagaagccacagctgcaacgtgctttcagaaaaatgggccaggccaaaggagctccccgtcagtgcttttcagtgttcccagcacaaagataaaattacacttccataggagtacacaaactaaaaataaaatttaaagaaagcgatctagttctgtatcattttccccatggtcgggtcccattcgggtcactggacatgcactgaaatcgcttatgaacagctgcttggttctgcctcgcctggagtttacggctgtcagcatccccagccctctgtgatggccccaggagagccaggcagacaaagatacttgtggcggtttggctgagggcaaagacaaagtcggcagttctttcctccaggcatgagcagggggcttccttaggtttttctttcagaagcccctatctagcttagagtaggcatagcacgtcaagggcagggcaaggaaatgctgtgccgtttccttaggatccagggggcgggagaaaaagtcaattgacaaagaatgcttgtcaccatgtcatgtcagcagctctttttctggtgcttcccaatcctgagtcacttcctgtttctaagttcctccaagatgtcattaactgtaggaaggagaaatatctaagtaatgacaccaactcttgcttacatacaaggtgagatgattcttttcacatgggcctagtcatagtcatgatcccgaagtgctaaatgcgtattttatttatttattttgagatggagtctcactctgttacccaggctggagtgcagtggtgcgatcttgactcactgcaacctctgccctcctgccccagattcaaacaattctcttgcctcagcctcccgagtagctgggattacaggcgccttccactgcgcccagctaatttttgtatttttagtagagacggggtttcaccatcttggccaggctggtcttggaactcctgacctcgtgatccacccgactcagcctcctaaagtgctgggattactggcgcgagccacccctcccggccactaaatccattatttcatgatgaaacaggaaaagttcccttgtccccttgcagggtgtgcaatgggagagtggctcacttcttcagtgccctgctgctcaaacctcaaacttctaggtgagcatacagatgggcaggctgtggggctctgaccccaagacagtgtccaggggtgaatgtttacagctgaagccccagtgggcgtatgttacagtgtgtgcttttagttttgctcttttagtttagccgtctataggcggcttgtgttagttcaattagacctctgcctcattgcaaggacagagggctttctgtatcccgaggttcttgccttaatgtactggaagaatcggatcgcacgtgggcttggagaatgagtgcaaggttttattgagtggaagtagctctcagcagatgggggagccagaagggagatgcttttcccctggagtccggccgcttggcggcccgggctctcctctgactgcccaggccaaactccatgtcattctgcttctgcaggtcggtggcctgccagcgcaccggtgcctgtcagtgttcctccggacatccagccacctgcatctgcctactagggtctagggaatgggggcgaagcatttgggcaggaaatgccagtcctcacctaggtccgtgggggtggagccctagccaggaaccatgccatcctctatgcagcacttcccttccccccttccatatcatttaaagggaccacctcttcccttcccagcactcccatatcaatgatattttgaaacatgcttaacatctagtcaaggatggcacactcttccatcaaccctgccccaacctcaaaatcactgatagattatttggctgaacccagaggagtccctggatcctctatgtaggtctcccctccagggagccagcagtcattctgagctgactgatgagatgaaactcatgtgctatgccaggtctaaaccttcttgaacagaggaggtaattcaaaacaattctctttccccttttattttggctacttcaaacaattttttaaaaatgagtggttttcaaactataatgtacataagaatcaccaggtaatttgggggtaatgcaactattatgcatctttctagtgtggttacttaactgtatgcatttctaactatgcaacagttttactccatgtaaattatatcttaataaaagatttaaaaaaatgaatcccccagagaacttgttagttctgattatgtaggtctgcaatggatctaaaatacacacacacacacacacatacacacacacacacgtatatatatagagagacagacagacagggtctcgctcttgctctgtcatccagggtggcgtgcagtggcgcaaccacggctcactgtagcctccaccttggcggtcaaccgatcttcctgcctcagcctcccaaggagctcggactacaggtgagtactaccatgcctagctaattttttgcttattttttgtagagacagggtctcactatgttgcccagactaggaatctatatatcgctatctctctctgttatatatattttttaattattattttttttgagacagagcctagctctgttgcccaggctggagtgcagtggcacaatcttggctcactgcaagcttcgcctcccgggttcacgccattctcctgcctcagcctcctgagtagctgggactacaggtgcccgccaccatggccggctaatttttttgtatttttagtagagatggggtttcaccatgttagccagaatggactcaatctcctgacttcgtgatccgcccgccttggcctaggaatctgtatgttaatagcattcctgttacttctaacaagtagtccaatggtccaatggttacattttgaaaaagtattataatagacagatgcaaggtccacccagcaaagatgcccctaaacccttgtgagcacccgctaacagctgcttctggaccctcctcttgcaagaacaaaggatactggattgtacagacctggattctgttcccaaatttgcctctgcttccatattcttcatgccgttgtgcaacctgcttccaatgggagatatctaaaggaaacaaaccctaaaagtatcatataagcccttaaaaccttaaaaacagttttcaaactctgtgtagcaaagaaaacagatttgatgccacaggtattagtctccgttctgatggcaaatctgccaaagaatctactttcaaaactaacagatccagagtgatttaactgctccaatagcgttcaaatagctcacaaattcattaccaaatatggttggctgaccagtttacaatctgtgctgctgagggtgagctgttcgtgacctaccagtcggctatcccgtgtctgagggaacaagagggcattgctgctcccttctcaggaggtggattaggcttttcaacgacactgctgactctgctgccgcaaagggtcccttgcagaaggcactccaggaaaggcctccagaaccgagggaagtcaagggtgcattcccagcttttgagcttagaccccagcctcccccgccaggctacctatattccccagattgcgacgccacgaatatgctgacctatttagccacagtagtcccagaagagcttcaaatcagctatgaaaaaaggcatcttttaagcccaaacctttagttggaaatttctctgctcaagtattcccaccaagatcaacttacaggtgaaatgtatgaggaagagattttcgtattagcttttctgtgtatatcactaagctcttgggtattatcttatataaatagggtaaaatcctcaatatgacattacctggcagctgattttcagttggtttcgaattctgagaaaggaaacacaaaccacaaatgaatcttcaaaactgtatttggaattgacaaaatcttcctagagacaaggccctgagcacacagagtccgtctccaccatgaaaatattacataagctgtacagaacaaaattagcaatgagtgatctttggcactagaacaggtgattccttagctgttcatgcaatatccaaactgcacaccacatgacattagattgctggttaaccatttaattttacatttaaattatcttaaaaggctggaagtcctagctaagttttcaatatcaatatgctacccatgtcataacacttagtgcctgaggtagagatttctgtaagagatttttttaaaacacaattgagagtataatacagaaaaacatttaaatcttggaagcatatagcctggttcaacaagccaactctgaaatgcagaactagtaccttttttatttgagtctcactccatcacccaagctggagtgcagtggtgcaatctcagctcactgcaacctccgcctcctgggttcaagagattgtcatctcatgcctcagcctcccaagtagctgtaagtacaggcacgtgccaccatacctaatttttatatttttagtagagacagttttgccatgttggccaggctggtctcgaactcctgacctcatgtgatccacctgccttggcctcccaaagtgttgggattacaggcataagccaccacacccagccagaactattacttcttttatctctgtagaaactgcactggataacttttttcctcttttttggcgacagtcttactctgtcacccaggctggagtgcagtggcgcgatctcggctcacagcaacctctgccttccaggttcaaggaaatctcatgcctcaacatcccgagtagctgggattacaggtgtgcaccaccatgcccggctaatttttgtatttttagtagagagggggttttaccatgttggccaggcttgtttcaaactcctgacctctagtgatccacccacctcagcctcccaaagtgctgggattacaggtgttagccaccatgcacagccgagaactttcttttatttggactcctgattttagaataccatggtttcttttaaaaaaaaaaaaaagtacgattattaacactgattaataacacatgaaccaaacccacttaatatcattattaaaaacaggctgggcacagtggcttatgcctgtaatcccagcaccttcggaggctgtgatgggaggattgcttgggcccaggagtttgagaccagtctaggcaacatagtgagagctctgtctctacaaaaaatacaaaaattagccaggtgtggtggtgagcacttgcagaccagctacttgggaggctgaagtgggaggactgcttgagccaaggaggtccaggctgtagtgagttgagattgtgccattgcactctagcctgggctcaaaacaaaccccaaaaaacaaaaccaaacatcaatagaactacatagggacaacagcaaatacaaatctttaaacacttcatgatgtggccggaatgagtacaagtatgcaattcaatgattccaacatttgatggtgactgtgaattattacatatttattacacataaatgagtttaaattttatttccaaactgcatgcagggactttattattactatgaatttttttttgagagtttcactcgttgcccaggctgaagtgcaatggcgcaatctcggctcactgcaacctctacctcctgggatcaagtgattctcatctcagcctcctgagtagctgggattacaggtacccaccaccacgcccggctaatttttggtatttttagtagagacggggtttcaccatgttggccaggctggtctcaaactcctgaccttgtgattcgcccaccttggcctcccaaagtgctgggattacaggcgtgagccaccatgcctggccaaaacctttgatttttaaaaaggcgtttcttgaagtaccttattaaacatttgatttgaaggaaactgtgcatgtctaacatacttgccttttacagaaagctggctagccaaaaatgtatcatcaactatcgattttattttcagaagtggactgtctcttaaatgagacagcataaagtatggacttgtagaagctgaacgagtaaatcatgagtgtaactgataacatgtaagtccattcttcgtataaactgctagagagtgtttcagaccatcactgatgtctgtgataaagagcaccaaagcatcacagtccaactttttttttaagcgccaagttcaaacaagtgaccaataataatggttggtccttgaaggtcttttaccagaggccttttctaatcacttcgtaacacttctgagatgtacatggctcctgaaacttgaaaacaaagccacaaaatgaacattaacatttctttaggggaaaatgctatctaattttcccctcgtttgaattaaccaaaaaaaaaaaaaaagcctatttcttttacaaatcttctgaataacgggttttaagagcaggccaggcgcggtggctcacgcctgtaatcacagcactttgggaagctgaggtgggcggatcacgaggtgaggagttcgagaccagcctgccagcctggccaacatgatgaagccctgtctatattaaaaatacaaaaaaaatcagcctggtatggtggtggtgcctgtaatcccagctactcgggaggctgaggcaggagaatcgcttgaacccaggaggcggaggttgcagtgagccgaaatcacaccactgcactccagcctgagcgacaagagcaagactctgtcttaagaaaaaaaagagcaaaggacacaccacatctgcataaatccaagtgtgttaaggaacataatcatgttgattgtatcctgattctagcaggtgaaggactaagcactcaacttgtatttggaggagaagcaagtgtcatgatggagcatgtcttatatggcaattcaaaacagtatgattctgatgcgagtgagaactaaatgttggacaggctttttatacaaatcccacctgcatgatccagaacaatattcttacagattcaatgcagactccaccaatgggttagctagacatcaacaggctcactttctttttttctttttttttttttgagacaagagtttcactctgtcttgcaggctggagtgcaatggtatgatctcagctcactgcaacctctgcctcctgggttcaagcaattctcctgcctcaacctcccaagtagctgggattgcaggcgtccacccagcactcctggctaatttctgtatttttagtagagatggagtttcaccatgttgaccagtctggtcttgaactcctgacctcaggtaatccacccgcctgggcctcctaaagtgctgggattacaggtgtgagccaccgcgcctggcccattttcttaatgtaagtccacaatatgtcattaggggagaatgactttggcaaactcatatgcttcaaaggcagaaagacatgtactaagaaggcagttagagctggaaaattcttgacataattacaactttagcaagagaataaaaatagattttaaaagtgtgtgcatgtggggaggtgacagaatatctttatatgtactttaagaagctgacgcgttatccagacacaaaagataacattctcatcaaaacaggccaagatgaaacaccaggggcactcttcacagaaattaagtggatgcttctggcgccaaatgtctttgcctggttcttcctggcatttctgcttgactccttccccctgtatcattctcaaatccccagcctttccactgggcaaagccactctcttctccctcaggctctgaagagataacacaaatgtatggacactttttgtccttcaattaaaaaacctgctggaagctccagtgatgttaagaattaactggtagttctttatcttagctaggcttatgtattccaaattttgcctgttttcttggaattatatgaatttccttattaaacatttgatttgaaggaaactgtgcatgtctattaattacccatgaggtacatgtgtatttctgaaatttctccttcagtctcacctgagtttaatttttgcctaagatgtttagagttcctgaggtgcttctctaggctaaaatttaaagatttttttttaaaaaagcaaataaaagtaaatgaatggctaaaagataaggttaaattttctaggctgggcatggtggctcacacctataatactaacactttgagaggctgaggcgggaggatcacttgaacccaaaagttcgagaccagcctgggtaacatagtgagacctcatctctacaaaaaaaatttttaaaacagaattagccgagtatggtggcacatgcctgtagtcccagctaatcaagaggctgaggtggaatgattgcttgagcctgggaggcagaggctgcagtgagctgagatcatgctgctgcactccagcctgggtgaaagagggagaccctgtctcaaaaaaaaatttccttaagtttcttttttttggtgggggtaggaatgcagtagagaaacaaaaacactgcacaaagggtgcagtgttctactattcatctaaataatggagaactggcattttacaattaagatataaaaaatattcatactttcagaatttccaagtcagaggtggcttacaacagctttcattagaaaagggtgagacgcccaaataaaatgctccctggtggaacaaagtcccctttaaacctttaccaagctctttctcagaagctcacaaaacttaagacaatgtgaacatgatgagaaagcaaagctctccaacataaggctgaaaatgacaataaaagactgcaataaaagactagtgggatgaacatgaatgcttgtcagtgacaaacacattatgcctacaaagaataaatactgcacttctctttaggtctatttacagacaggaccccatgacctttcaggcataaacctccactggcagaagtaagaatttaatcacaaaacttctatggtaaattataaaaaataagaaatttggatttaggccttctgccatttccaatacaagtagctttgagtattcttggttgacaagggaatgtttgcatttctaatgttaacaaagaaaatatccaccactggcttcttaaccagacggaagcgggcaggtttctggatagaggcttaaggcaaatcaaacaggttcacaactaagcagcctattagggattccaggcatggctttgctttctgagggacagctccatatcatctctagccaggttttccacattgctaccaaactggggacacgtttctgtatcaggcttttgaaagaactttaagttatatacatataccatcaaagcatatactggtgatgcttgatatttaaaggaatcctacagtgaatcatttatttcctttgaaaataaggttttcaaaaattggctacaactctgatcgcatgaatgagattcaaagatttctcacataaaagaaagatctcaacctccttctactgtgaacttgctttccaagactaaaaactggtatctcctcttcagtctccttacacatctgaaatcgttcctgcaatatgagaggcacttttattaggtgtagcatctattaaaaactctaaagccagggtagaatttgctgaacaaagtaatagcactagcctaataggcattatttataaggactttttcccctttaatataaaagtataactacagcagttcaatgtacaaatacaaaaaaagttctcatactaaaaaaaaaaaagtaccataatactgtacatacaaaaactgttcaacaagaatgatttaaatatgtctgttcttctccagatctggaagacacaaatgtaaagttctgcaactgtattattgctaagaacatgtgcctgggaacactgtgtttccctttctctccctcagcccagccccgcctccagagtcccctgagcttggatcatgagccaacagcatccctgaagataaccagagccaaatgtttactcaatggaagtcattattcagtgagctgctgcttaccataaactatgaaaagcacaggttttaagcccgccaggattaaatccagacggaggtcttcccatcccctgatttgctactggcagtgcttttgttggacccagctttggaccccactttggccttcttctcccggggaccatgagggttgttttggtgactgtaggcctgaactgccagatccaagcgttcctgagccatcctgatctcccgctgcagagcctccaggtcagctgggaggttctcctcatggctgccatactgctgttcctgggctgtgttggccttgttttgcttgtaggcgatcttagcattggacagttcggtgtactggatttgatctggtttgacagcaatgttatagccagggggagcagatggtgtattccaagtgaaaggataattataagcacccggatcctcaagttccctccttttactgtttagtgagtctcgaatggtcccaaaccctaaatgaagcatctcccaaatgttaagcaagaggcaaaggcctgtaacaccatacattatcagaaggaagatggtcttttcagtgggtctagaaataaagcagtctatcttatgaggacaaggaagtctgctgcacacataaaacgggtggacttggaagccatacagaaaatactgccctatcagaaaacccacctcaaacacggtccttgccagcaactgcagcacatagattttcatgagcccatcttcccgaatccgtcgtcggccatcatgcttaggtttgggttggctctgctctttattttccttatcactttctaactccatctctggatacatcataggatcctcttcgttgtcctcctccgtttcttccagagcccggtgttgtttccagcgcattgcatagggcttgctccgagctgccttcttgtctgcttcaccgtgctccattttggcaatcttgtggatagcatagcccaggtacatcacagagggagttgccaccaggatgatctggaacacccagaagcgtacatgggagagaggtgcaaacgcatcataacagacattctcacagcccggctgttctgtgttgcacacaaatttgctttgctcatcgtaatagatggattctcctcctacagctgtaaggacgatccggaagacaatcagaacagtgagccagatcttccccacaaatgtggaatggttgtgaatctcctctagcaggcgagtcaggaagctccaactcatggtgattgaattggtatgccctgataaaagtggaaaaataccaaaataaaatcaacaaatattaaatcttaatttaattactaattatgatatctctaggaactactgctttgaatacttgaaatctaacctcaaggttcacagtggaacaaatgttagaataaacagcatctcagttgggtagggtggctcacgcctgtaatcccagcactttgggaggccaaggcgggcagattagttgaggtcaggagttaaagaccagcctggtcaacatggtgaaactccgtctctacaaaaatacaaaaattacccgggcacggtggtgtgcacctgtaatcccagcagctcaggaggctgagacaggagaattgcttgaacagagcaagactccatctcaaaaaaaaagaataaacagcatctcactctctactatcttcaagaaggtcaattcacctcagtcaacacctgttggccccacaaggtcccagaaagtatggattgctttcatatctcctctggtttaaaaggtaaacttgtagctactatttactgagatatttctcagaccttggttcttctgtttgttttttttttttttttttgagacagtttccctctttcgctcaggctgcagtgcagtggcgtgatcttggctcactgcaacctccgcctcccaggttcaagtgattcttgtgcctcagcctcccgagtatctgggattacagtcatgcaccatcatttttgtatttttagtagagatggggtttcaccatgttggccaggctggtctcgaactcctgacctcaggtgatccgcctgccttggcctctcaaagtgctgggattacaggcgtgaaccaccatgcctggccagacctaggttctttacacatactattatttcatgagaccttcagaattttgtgagatagaaatttaaaaaacacacaggtatagttattcggtccaatcacagaaaaaccaccactgagaacataaaggggacacctcggttggactccactgtgaaggggtgatttattaggaaacttaaattttagacaagtgctaaaagggattaagaagatggtacagctacaaactgctggcaatcattaagaactaaaacaaaagacagaagggaactaggaagatcttccctagctaggctgcatcgcataccagattttggttttacttagaagcccagtaaatggtcttgcaataaatattgtacccctttactatataacagaatctacaaattatacttctgtaccttatttatggtagacattaaaaaatgattgctaaactgaactgtgaggacattaaatccaatcaacagcaaatccatttaaaacagcattttaaaggacagattctttctgagattcccagatctacatccaggatccaggtaaaaaccacctaaatgaggtaatatatgggaaatccccaataaagccccgacacaaagtagacttaatttttaacttgtcctcctccctctcccagtttacttctgcagattacagatgatttgtcagcaccaccaaagtttaaacacactttacctgttgtccagaacttcggttacccaaaattttcttagagaaatgatgttttgattgcaatttttccagattccctctggaagggaaaaagaaaagagcaggtcataagctttctcccacagaaaacaatgaatcactaaaatgccattttcagaaagaaacaaagttttctatgtatcataaaaatcaatgagaataagatagaaacaggcttgagtttgaataccagtcttctcctccccatacaggtggcaggagaaaccatgtaacaggtgacccaaagattcttaagtcaccacagtctaagaatatacgacaggaagatgcgtcagtagtaaaaatatgaagcagatgaactctggcacctataggaaaaagccaaagcagaagaattgcagcaaattgaaagcaggtcactaaaggccttgcaaaaaccttcaccccatctgctctattccctgaagcagccgatacacctctcagggggatttgagcagctaactaggagcaagctgtttagctaaaacacccaacagctggctctcagtcacaggaacacccgtctccatgggaggtgatttacagatacaactactcacaaaaagtcacagaaagaaaacacctgcatctgtactggattaaacagcaaaacagaaaagtttccaagatgaattattgctcattattaagctctggcaactctgcatagctctggccaaatgtcatccataaggcgcccacatttagcaaataaatttaaaacaattcctgaatgttatgtgtttatagtaacttaattaaaagggtgctttgtgttgttgtttaaagatacaggaaaaaaaaaactggaacaatttccaaaggaacaatggaaaaaaaaaaagtgaaggcatgaagccgcataaagatttgcacataagcctgggcaatatagtgagaccctatctttccaaattttaaaaaaattagccaggtgtggtggcagtggtggccactgcagtccaacctggtagatagaacaacaccctgtctcttacacacacacacacacacacacacacacacacacggcccagcacagtggctctggctcacgcctgtaatcccagcacttcgggaggccaaggtggggggatcacatgagttcaggagtttgagaccagcctgggcaacatgtgaaacctagtcttcaccaaacaacaacaacaacacacacccccaaaattagcatggtgacgcacacctgtggtcccagctacttgggaggctcaggtgaaagaatcacttgagcccgggaggtagaggttgcagtgagttgtgatcgtgccactgcactccagcctaggtgacagcgaaacctcaaaaaataaagaagcaaaaagatttacatatgaagaatcccggccaagcacggtggctcatgcctgtaattccagcactttgggaagccgaggtgggtggatcaccagcagtcgggagtttgagaccagccagaccaacatggactgaccaactaactaaaaatacaaaattagccaggtgtggtggtgcatgcctgtaatcccagctatttgggaggctgaggcaggagaattgcttgaacctgggagggggaggtggaggttgcggtgagctgagattgtgccattgcactctagcctgggcaacaagagcaaaactccatctcaaaacaaaacaaaacaaacaaacaaaagaatccagctgggcatggtggctcacacctgtaatctcagcactttggaaggctgaaggaggaggatcacttgaacttgggagcttgagactgcaatgagctatgatcataccactgcactcctgcctgggcgagagagggagactctaacacaataaaatttccagtacagctcccatttctagccctgttttccaactgagctcaccacctcttttctcattgaatatacaagttataaaacctcaaaacaagaagtaaataatataaaatctttaaatggtgatgtaagccaggtttccaacatagaactccatgattctcatccacaaattctctgcaggctcagattttccccaaagcctgaaatttctatttgttccaataagccaaaattatgaaaatacaattagttagaactaactcatctgttatatctccatccacaaagataaatgtgtatcttttttttttttttttgagacggagtttcactcttgttgtccaggctggagtgcaatggcgcgatcttggctcgccacaacctccacctcccaggttcaagcaattctcctgcctcagcctcccgagtagctgggattacaggtatgcaccaccacgcctgggtaattttgtatttttagtagagacggggtttctccatgttgaggctggtcttgaactcctgacctcaggtgatccgcctgcctcggcctcccgaagtgctgggattacaggcgtgagccaccacgcccagcctttttttttttccagacagtctcgcttttttggccaagctggagtgcagtggcatgatctcggctcactgcaagctccgcctcccaggttcacaccattctcctgcctcagcctcccgagcagctgggacaacaggcacctgccaccacgcttggctattttttttttgtatttttttgtagagactgggtttcaccatgttagccaagatggtctcgatctcctgacctcgtgatccacccgcctcggcctcccaaaatcctgggattacaagcgtgagccaccacgcccagctaattttgtatttttagtagagacgaggttatcaccatgttggccaggctggtcttgaactcctgacctcaggtaatccgcctgcctcagcctcccaaagtgctgggattacaggcatgagccatcgcgcccggccaaatgtgtatcttttaagtaattattgttatgaaagaatttctcaacagttgagcttttcaataaaattttcttggggggaagaattggtgataaatccttcagagcttatgtaagttctaaagcagccattttaacacatccattagtaagtattgtgtactgattaagctgcagacgtggaaaatgctgaacccttacagtctggttttccatagacaatcctaagagccacagagtatgggtactctatacccacactctgaagtcttcggaatgagtatcgctacggtctatgctcttgaccacaaaatgttgagaagatccacaacaaccaggggttttctccacaaaactcgctggagatctgcagacggactcccctccataccccaggtcttcagctctgatcagtgcatgtgtggggaggagcggggatctggatacctgatcctctctatactggatggacatcaattaattcattttttttttttaaacagggtctcgctctgttgcccacactggagtgcagtggtgcagacctaagtcactgcagcctcaacctcttgtgtcaagcaatcttcccaccttagccccctgcagtagctgggactacaggtgaaggaacactaccatgcctggctaatttctgtatagatgaggtttcgtcatattgcccaggctggtcttgtaccccagagctcaagtgatctgcccacctcagcctcccaaagtgttgggattacaggtgtgagccaccacacgcagccaatataatttctttctttttttttttgagatggagtttcgcttttgttgcccaagctggagggagtgcaatggcacgatctcagctcactgcaacctccgcctcctgggttcaagcgattctcctgcctcagccccccaagtagctgggattacagacatgtgccaccacacccagctaattttgtatttttagtagagacagggtttcaccatgttggtcaggctggtctccaactcctgaccctcaggtgatccacccacctcggcctcccaaagtgctgggattacaggcgtgagccactgcacctggccttttttcttttttttttttttttttgagacaaagtctctctttgttatccaggctggagtgcagcggcacctgggctcactgtagcctcagcctccccaggttcaggtgatcctctcacctcagcctcccaaatacctgagactacagttgcacgccaccatgcctggctaatttttgtattttttgcagagaagaggttttgccatgttgcccaggctggtcctgaactcctgggctcaagtgatctgcctgcctcggccttccaaagtactaggattacaagcatgagccactatgcctggcctctttctcttaatataattctgtgggaaaaaaaataggccggcgcggtggctcacgcctgtaatcccagcactttgggaggctgagacaagtggatcacctgaggtcgggagttcgagactggcctagctaacatggtgaaaccccgtctctactaaaaatacaaaattagccgggcatggtggcacgtgcccataatcccagctacttgggaggctgaggcaggagaatggcttaaatctgggaggcagaggttgcagtgagccgagatcgtcccattgcactccggcctgggcaagaacaaaactctaaaaaaaaaaaacaaaaaacaaaaaacaaaaaaacccagctgggagcagtggctcatgcctgtaatgccagcactttgggagcccaaggcggatggatcacgaggtcaggagattgagaccatcctggccaacatgatgaaacccgcccctactaaaaacacaaaaaaattagccgggtgtggtggtacacgcttgtagtcccagctactcaggactacaagctgaggctgaggcaggagaatggcttgaaccagggaggcagaggctgcagtgagtcgagattgcgccactgtactccagcctggcaacagagcaagactctgtctcaaaaatcaaatcaaaacaaaacaaaacaaaaaacccataacattaaaacccatttatgcctattgttccattactggaacgctacgcatgtgggagttatttatatcctactgttcaagatcattgccaaggtctgattttttcaaattcaaaaaattgcaatctcaggcataaatgggttaaaacaaacaaacacacacaaaaaaacccataatcacagctacttacaaatgttttggttttccttatgtccttctagtctttatctaaatgaatactctttccaaataacactaatttactaagggatctagtagtaaaaatgaacttttttttttttaattgagacagagtctcactgtcgcccaggctggagtgcagtggcacaatctcggctctctgcaacctccacctcccgggttcaagcgattctcctgcctcagcctcccgaatagctgggactacaggcccgtgccaccatgcccggctaattttttgtatttttagtagagacagggtttcaccacattaaccgggatggtctccatctcctgacctcatgttctgcccacctcggcctcccaaagtgctgggattacagacgtgagccaccacgcccggccaaacttctcttatacttgtttactatttgcatttctttttgtgtaaatgtgtttatcaacttaactccaacatctcacaaaatgggtgacgagcaactaaccttccttccttctcctttcctccctttctcttttttttctttgagacaagagtctctgtcacccaggctggagcacagtaccgcaatctcagctgactgtagcctccgtctcctgggtccaagcaattctcctgccttagcctcccgagtagctggactacaggcgcacaccaccacgtccaactaatttttagtagagatggggtttcgccccgttggccagtctggtctcgaactcctgacctcaggagattcacccttcggcttcccaaatgctgggattacaggtgtgagccaccgcacccagctgcaatcttctttctaaaataaagaaccatgagtttcctaaaatgaatggcagtatcaccaatgtttttacctattgagtcagtaagtttttcttggatactcttccctttcctctccttccaagttactttttttttttttttttttttttttgagacaagagtctctctctgtcgcccaggctggagtgcagtaccacgatctcaacttactgcagcctccatctcccgggttcaagcaattctcctgccttagcatcctgagtagctgggactacaggcacacaccaccacgcccaactaatttttgtatttttaggagagacagcgtttcaccatgttggccaggctggtctccaacacctgacctcaggtgatctgctcacctcggcctcccaaagtgctaagattacaggcgtgagtcaccacgcccggccacaagttacccattcttactctcagtgaaatgtcaaataattcctgggagatgagtgcagtctggggaacattttgaaaacattagtcctcatttctgtaatgggtcactcattctctaggcaagccccctccctggcagctatgtattaacaaagcattaaggattggcttacaatgttacagagtacaatactcctccagagaaattaagatcatttcaagaagtagaatgagtagaaggcaggttctggaattaacatttctaagcagaatatgtcactgccaattgtggtctcactgtggagaaaagtgggttcttgctccactgaagtttcctttcccctgaaccattattattattttttgagacagagtcttgctccgtcgcccaggctggagtgcagtggcctgatcttggctcactacaagctccacctcccaggttcatgccattctcccgcctcagcctcccgagaagctgggactacaggtgcccgccaccacgcccggctaatttttttcatttttagtagagatggggtttcaccatgttagccaggatggtcttgatctcctgacctcgtgatccacccacctcagcctcccaaagtgctgggattacaggcgtgagccaccacacccagccctgaacattttatctattttttcttgaatggcttcttaaatttttttttaaagaatgctgcaattcacggaagcacataattcaaaaggattcactcactcacacacaaaaaaccctggagatctgcagaggggcccctcagtcttcagaactgatcagtgcacatgtgaggaaatggtctacataagggacctgaaaaggtgcctaaaattcaggacatagggccggagcgatggctcacgcctgtaatcctagcactttgggaggccaaggcaggtggatcacctaaggtcaggagttcaagaccagcctggccaacatggcgaaaccccatctctactaaaaatacaaaaattagctgggcgtggtggcatgcgcctgtaatcccagctacttggaggctgaggcaggagaaccacttgaacccggggggcggaggttgcagtgagacgagaaggcaccacttcactcaagcatgggtgaaagagcaagactcagtcttaggaaaaaaaaaaaaaatttcaggacataagtcttctctggcttccctgcttctgaaaacaaacttggttatagtgtaggggctgaaagtctgagattcagctgtgaatggctctcatgaataaaaaatcatgtctatactccatctacaaatagaaaatgacatggaagcacatgtcaagtggtggagatgggtggaggccaaatacctcaatgtcttttgctaattagtaaagcaccaattttttattatttttttgaggctgggtcttgctgtcacccaggctggagtgcagtggcatgatctcagctcactgcaacctccatctcttgggttcaagtgattctcccacctcagcctcctgaatagctggggtccaactgatttatatgtacttttatacttaatatcttcgtgaatatatcctaaatgccttgagtttatatctataaattctaggaggtggtattattagatcacaggcaatgtaaatctgcatggtttttgctttgtactgtcatttggttttcaaaaaaggcactagtaatttacagtgcctggcaatgaatgtatacttaaaacaacttcacctccacctcttcagcactgtcattatgctcctttactagatgcaaaatggcatttcaaaatcatgtcaattttcatgtttctaagacagtaggatacgttccccctcatatatccaacccctttgtgggttatttccatccttttacctatttgtctataaaaggtaatcttgatatagtatagacattgattaattgacatttaatataaacatctcagtttattttactgacttccttcaaattttattatttttatagaatcgtatcaattctttaaaaaattaaaaggttgaaaaacttggggcgcggtggctcacgactgtaatcccagcattttgggaggccgaggtgggcggatcatgaggtcaggagatcgagaccatcctggctaacaaggtgaaaccccatctctactaaaaatacaaaaaattagccagacgtggtggcgggtgcctgtaatcccagctactcgggaggctgaggcaggagaatggtgtgaacccgggaggcggagcttgcagtgagccgagatcgtgccactgcactccagcctgggtgacagagcgacactccgtctcaaaaaaaaaaaaaaaaaaaaaaaaaagttgcttttttctagaacggcttctattttaaaagatactgcaattcatggtagcccataattcaaaaggattcactcacacaaagaaaacccaaatactgaagaaaatcaagtttgcttatataacatttattagacagaaaccaaatgtgctatttttagtctattttccaaataacttagacacaaatctaccttgtcttacactagaaaacagaatttaaaaaaattagctggcatcaacatggtaataaattatgtaattctctctcaaattcttatctcaagagttttctataggttatatccaaacagactcaaattaacactgtttttctgtaaaacataattcagtttgttttgttttgtttttggttttctgagacagagtgtcgctctgtcgcccaggctggagtgcaatggcgaagtctcagctcactgcaacctctgcctccggggttcaagcaattctcctgcctcagtcagcttctcgagtagctgggattacaggcactcgccaccaggcctggctaatttttctatttttagtagagatgaggtttcaccttgttatccaggctggtctcgaactcctgacttaactgatccctctgcctcggcctcccaacgtgctgggattacaggtgtgagctaccgcgcccagccgaattaataggatttttgaagatcaaatgtaatgaacattatttgaattatttcagcaggtagattctaatattaaactcattttaaagatgaggaaatcaggtttaaaaatttataatttgcctgccaggcgcagtggttcacgtctgtaatcccagcactttgggaggccaaggcgggcggatcacctgaagtcaggagttcgagaccagcctgaccaagatggagaaacctgcctctactaaaaatacaaaattagccaggcgtggtggtgcatgcctgtaatcccagctactcaggaggctgagacagaattgcttgaacccaggaggcggtggttgcagtgagctgagatcgtgccattgcactccagcctgggcaacaagagcaaaagtctgtctcaaaaaaaacccacaaaaaacaaataactttattatttgcctaaaatcatctacttattaagtagtgaagccagaatttgaagtcaggcagtcttgcactagagtttggactctttcttgaccactcgctagtaaagaattacattacagatggaattatgtacaggttctatgtgaccctaatcccagtctttaggatcagaactgcaaaagaaaagcacaaggccaggcacggtggctcatgcctgtaatcccagcactttgggaggctgaggcgggcggatcacctgaagtcaggagttcgagaccagcctgaccaagatggagaaaccctgtctctactaaaaatacaatattagccaggcgtgatggtgcatgcctgtaatcctagttactcaggaggctgaggcaggagaatcgcttgaactcaggagggggaggttgtggtgagctgagattgtgccattgcactccagcctgggcaacaagagtgaaactccatctcaaaaaaacccaaaaaccaaaaaactttattatttgcctaaaatcatctacttattaagtagcaaagccagaatttgaagtcaggcagtcttgcactggagtttgggctctttcttgaccactcgctagtaaagaattacattaccaatggaattatgtacaggttctatgtgaccctaatcccaatcttcaggatcagaacaacaaaagaaaaagcacaaggccaggcgcggtggctcatgcctgtaatcccagcactttgggaggccgaggtgggcggatcagctaaaatcaggagtttgagaccagcctggccaccatggtgaaaccccatctctactaaaaatagaaaaattagccaggcgtggtggtgggcacctgtaatcccagctactcgggaggctgagactggagaatcacttgaacccaggaggcagaggttgcagtgagctgagattgcgccattgcactccagcctgggcgacaagagcgaaactctgtctcaaaaaaacaaacaaacaaacaaaaaaatgcacaaacaccagaaagaaaatacatttcagagtttaagatcttaaaatgtaaaatggaatgaaagtttaaaagtaaaataaaacagaacaagctttcttggtagctggggaggaaggaataaacggtatctttgacaaaaatgatttatttatttaaggaggacaatttatttgggcattgagaatagggagaccacaaaacaactattaacccaagaaatcacttccacatatatctttggaaaagtctctaatagtctcatgttaaaaaaaaaaaaaaaggccaggcatggtggctcacatctgtaatcctagcactttgggaggctgaggcgggcggatcccaaggtcagttcaagaccagcctggccaacatggtgaaacccagtctctactaaaaatacaaaaattagccaggcctgggctactgtaatcccagctactcaggaggctgaggcaggagaattgcttcaacccggaaggcagaggttgcagtgagccgagattgtaccactgcactccagcctgggcaagagagcaaaagagcaaaactccatctgggggtgtggggcgggaagaagctggctgggcgtggtggctgactcctgtaataccagcactttgggaggctgagatgggcagaacacttcagctcaggagttcaagaccatcctagacaacatggcgagaccccgtctctatttaaaaaaagaaaacaaaaaacaaaacctctcaagtttttcaaatcaagcactaaaaacccccctcattaacttgtgtcctgttaaattatttttattattttactgtggtagaatagacataaaatgtactatcttaagtgtacagttcaagtattaaacacattcatagcattatcaaccatcaccactacctccagaatttttttcatcttgtaaaactgaaactctagacccagaaacagtaactccccatttccccttctcccagcccctggcaatcaccattctactttctctatggttgtgactacctaattatctcatataaatggaattatatatttgtctttttgtgtctggcttatttcactcagcataatgtgttcaaggtttatccacgttataccatgtgtcagaatttccttcctttggccaggcgcggtggctcacgcctgtaatcccagcactttgggaggccgaggcgggtagatcatgaggtcaggagatcgagaccatcctggctaacactgtgaaaccccctctctactaaaaatacaaaaaattagtcgggtgtggtggcaggcgcctgtagtcccagctactcaggaggctgaggcaggagaacagcgtgaacccaggaggcagagcttgcagtgagccgagatcacgccactgcactccagcctgggcgacagagcgagactccgtctcaaaaataaataaataaataaataaataaataaataaataaataaataaaaagaatttccttcctttttaaggctgaataatatattccatagtatgtacataccacgttttttttatccattcatctgttgacagacacctgggttgtctacaactttggccactgtgaataatgctgttatgaacgtgggtgtacaaatcattcaattcttttttttgaggcagaatcttgcctcgtcacccaggctgtagtgcagtggcatgatctcggctcaatgcaacctctgcctcccaggttcaagtgattctcctgcctcagcctcccaagtagccaggattacaggcgtgtgccaccacacctggctaatcattcagttcttttgttttaatatccagaagtggaattgctctatcatatggtaatttttaattggttgaggaacattatcttgttttccacagtggctaatttttttacatttttagtagaaacagggtttcactttgttggccaggctggtctcaaactcctgacctcaggttatccgtctgcctcagcctcccaaagtgctgggattacaggcgtgagccacggctcctgggcgaaaagtgattcttaaccttgaattttgtgaaactaagcaagcaatggactagaaggcaagagattctaatcccagaatataatccatgcacttcaggaataagttctttccatatcctaatttctgaaataaatgaagaatatcaagttagatgatttctaaaatctcttccatttaacatttgatgaaaactatctcagagtaaaattcaccaaactgacaaattatgtggaactcaaaagtctagggataggagaaaagtaaagtaatagcagtaaaattaaacaatataacaagatgtcaaaattttaaaaaggcacttcccaaacgatcatttcagaaaatttgcggttggactaaatttaaaaatttcaatattgactcactgtaattccaaagtaggtattaacaatctaggcatcccagctcatgagctgagcaatccactaagaatcgtgctagtgactcatacccctgaacgcgactgctttatgtgcagagaccaggaatcaattaaagggtttacaatgaagtgttgtttaactggaacgttttaagtggaagttaattccacatgagtgataatagatgtttaataactagctcgtgacaatttctaagcaaaagcattacagcagctaagtagcacatagtaatctatgtgctacaaacatgaaaacaacttgttttcaaaagagctcttggctatgaatatttgaaaaacctaaaatataatttgtggcgaatcaaattataaaatctcatggagagtgagtagtttgagatcttggctgtatcaaccaatgaggaaacaaaaagcaccattgtgggttgaagtgccaattttcgctggcaaaaagccattctatttgaatgtaagaaccttcaggaaccagctggagaagtatgaggaacctgggatagggataatatattcattcacaacatatcctaagtggaactgtcttcatgcaaacaggacaatattggaacatttgtccaaaacagcctaagattaggtcaaaccaactgttctgaacaatgctcagtctagaaaaacgaacatgtctaagacaaaaataaatgtatgattttccaatatgactacgtttatgatacaaaatttctttaaaaaaacccaacccataccatcggctgggtgcggtggctcatgcctgtaatcccagcactttgggaggctgaggcaggcggatcacctgaggtcaggagttcgagaccagcctgaccaatattggcgaaatcctgtctctactaaaaatacaaaattagcgggcgtggtggcacacgcctgtaatctcagctacttgggaggctgatgcaggagaatcacttgaacttgggaggtggaggctgcagtgagccaagatcgcgccattgcactccagcctgggcaacaagagggaaactccgtctcaaaaaaaaaaaaaaaaaaaaaaaaaaaacaacaaaaaaacaccaacacccataccatcatacaccaatggtgtcatctggtacaacttttctggaaggcatcttggcaacagttatcaagaactttaaagtgcttatatcctttgatcaataattccacatttagtaatttaccctaaacaaatacagggcatttattataagaaacacatataattaggttgggtgcggtggctaacacctgtaatcctagcactttgggaggccgaggcaggtggatcacaaggtcaggagatcaagaccatcctggctaacactgtgaaatcctgtctctgctaaaaatacaaaaaattagccgggcatggtggcgggcgcctgtagtcccagctacttgggaggctgaggcaggagaatggtgtgaacctgggaggcggagcttgcagtgagccaagatcgtgccactgcactccagcctgggagacagatcgagactccgtctcaaaaaaaaaaaaaaaaaaaaaaaaaagaaacatatataatttatggtataacctccataatggaatattgtacaaccattatggggggaataaggagggagtaactgctaacgggtatcaggtttctttttgacggaataaaaacaatctaaaatattctaaaattagggtgtgttggctcatgcctataatcccagcactttgggaggccgaggcgggtggatcacctgaggtcaggagttcgagaccaacctggccaacatggtgaaaccctatctctactaaaaatataaaaaattagctgggcgtggtggcaggcgcctgtaatctcagctactcgggaggctgaggcaggagaatcgcctgaaaccgggaggcagaggttgcagtgaaccaagatcatgccattgcactcccgcctgagcaacaagagcgaaactccatctcaaaaaaaaaaaaaaaaaaaaagagtccagcctcagtaaattgtgtgatagagccacttaataaaatagagtacactgaagaaagtctaggtgtggggccaagatgaagagctcactttggacaacacaattcaaattacctcctctgagtatctctgtggagatgttgaacaggcagccaggataaaaaaagaggtctggctacagataaaaatgtggcagtattcaaaatatatatggtaaccgaagccacagaatggataatttcaggaaggaaaattttgaatccaaataaacatctactctggatgggcaattaggaattccaagtccaagaatgactcaaggggaattcctaaaatagagtccagctctaatttgaacgttcccaaaaggaatgttataactcattagttaagtaataataaattaagccaaaactgataaatactacaaacatgtgaatgaaaataatctctataactattgggagttgaatatagtttagagattagaggataagaataggggtgtgtgaagtttatccgatttatatagaggaaaaacatcaaaacttactctgaaaccctatgcatttctttcctgttttttttttttttttttttttaagacggagtgttgctctgtcaccaggcttcagtgcagtggtgtgatctcagctcactgcaaactccgcctcccgggttcaagtgattctcctgtctcagtctcgcaagtagctgggactacaggtgtgtgccaccaggcccagctaatttttgtatttttagtagagacggggtttcaccatgttggccaggatggtcttgatctcttgacctcatgatccccccgcctcggcctcccaaagtgctgagattacaggcgtgagccaccgtacctagcctctttcctccttttttttaaaatttcttatttttgtagagacagggtctcatcatattgcccaggttggtcttgaactcctggactcaagcaatcctcctgccatgacctccagaagagctgtgattactggtgtgaggcaccatgcctggcctttctttcctttcctttttttttttttgagatggagtcttgttctgtcgcctagcctggagtgcagtggcacaatcttagctcactgcaacctctgcctcccaggttcaagcgattctcctgccgcagcctcctaagtagctgggactactggcgtgtgccaccacacctggctaattttttgtatttttagtagagacggggtttcacggtgttagccaggatggtctcgatctcctgatctcatgacctgcccacctcggcctcccaaagtgatgggattacaaggcgtgagtcactgtgcctggccctcttttcgttttttgagatggagtcttgctctgttgccaggctggagtgcagcggcacaatctcagctcactgcaacctccacctcccgggttcaagcgattcccctgcctcagcctccagagtagttgggattacaggcgcgcgccaccatgcccggctaattttttgtattttagtagagatagggtttcaccatgttggccaggatggtctcgaactcctgaccttgtgacctgcctgcctcggcctaccaaagtgctgggattacaggtgtgagccaccgcacccggcctcttttttcaaatagagactgtcccactctgttgaccagggtggagtgcatggtgtgatcacaactcactgtagccttcaacttctgggctcaaaaaatcctcctgcctcatcctcctgagtagctgaaaccacaggtgtatgccaccacatccagctaattttcaaattactttttgcagagacagggccctcactatgttgcccagggtggtctcaaactcctgggctcaaggtatcctctagcctcagcctccgaaagtgctgggagtacatgtgtgccactgcactccagactgggtgacacagtgaggctctgtctcaaaaataaaataaataaaataaaatcagtcaaattagccaggcgtggcagcatgcgccagtagtcccaattacttgggaggctgaggcaggagaattgcttgaacctgggaggcagaggttgcagcgagccgagatcgcaccactgcaactccagcctggatgacagaacaagactgtcttaaaaaaaaaaaaaaaaaaattagtcaagtgcaatagtgagaagggggggaaagaaagagtccaactattttttttttttaatcaagtgcttatatgttttggggaagaaaaaaaaaaaaaaaacgttgggatccaggtgccttggcctgtaatccccatatttgagaggccaagaggactgcttgagcccaggagttcaagaccagcctgggcaacaaaacaagaccctgtctcttccaaaaaaaattttaaaattaactgggcgtggtggcggtgtgggcctgtggtcccagctactagggatgctgtggtggaaggatcgcttgagagcaccactacactttagcctgggctacagaacaagactctgtctcaattacaaaaaaaaaaaaaaaaaaaaaaaaaaaaaggctgggcgcagtggctcatgcctgtaatcccagcactttgggagaccgaggcaggtggatcacctgaggtcaggagaccagcctgaccaacatggagaaaccctgtctctaccaatacaaaattagctgggcatggtggtgcatgcctgtaatcccagctacttgggaggctgaggcaagagaatcttgcccagggggcagaggttgcggtgagccgagattgcgcgactgcactccagcctaggcaacaagagcaaaactccgtctcaaaaaaataaaaagggccagacacagtggttcgcgtctgtaatcccagcactttgagaggctgaggcaacctgaggtcaggagttcgagaccagcctagccaacatggtgaaaccctttctctactaaaaatacaaaaattagctgggcgtggtggtggacacctataatcccagcttctcgcaaggctgaggcaagagaattccttgaacctgggagacggaggttgcagtgagccaagatcgtgccactgcactccaccctgggtgaaagagtgagactcagtctcaaaagaaaaaaaaaaaaaaagttgaatgacttaatgggcaccagaatgcttttgtccaaattgtgcttgtattacaagcattatagcctcaaagaacaaagcttcaactgagagctggagaagaattcatttaccagaatacttcatttctttctttttattttgagacagagtctcgctctgtcgcccaggctggagagcagtgatgcgatctcggctaactgcaacctccacctcccaggttcaagccatttgcctgcctcagcctcccgagtagctgggattacagatgactgccaccacgcccaggtaattttttgtacttttagtagaaatgggatttcaccatgttggctaggctggtcttgaactcctgacctcaggtgatccacccgccttggcctcccaaagtgctgggattataagcatcagccaccactcctggccccatttcatttctttagaagtaaaatgctggccgggcacggtggctcacgactgtaaccccagcattttgggaggccgaggtggccggatcatgagatcaggagatcgagaccatcctggttaacacgatgaaacagtctctactaaaaatacaaaaaattagccgggcatggtggtggacgcctgtagtcccagctacacaggaggctgaggcaggagaatggcatgaactcgggaggtggagcttgtggtgagcagagatcacgccactgcactccagcctgggcaatggagcgagactccgtctaaaaaaaaaaaaaaaaagtaaaatgctatctgcaaagagatcatcatatccttgttttaggaaaactctttgggcaatatattccacaggtctgaaagataaacctttattgccaaggactgctctcagccaactacagtacttgtaaaattcaagaatgtataactgtatgccagccagtactgactaacaggtcattcactctttagagttgcagtaaatagcaatgctcaaacgcccagctagttttttgtatttaaaattatttgtatttaaatcttaaaaaatatttttaaaaatacattttactaggttcttatttcaacacaaactgaactcatcagctgtagcagtatgttgaaaaacaactgttgccattcagctgatattaacagctcagaactgttttctatgtctaaatttcaggttaacgatatcagccaaaatctatcttctcatacctattctcaaaggaacggtcttacaaaactaataatctggtcgagtgcggtggctcacacctgtaatcccagcactctggaaggcagaggcaggcggatcacctaatgtcaagagttggagaccagcctgaccaacatggtgaaaccccgtctctactaaaaaatacaaaattagctgggcatggtggggcattcctgtaatcccagctacttgggaggctgaggcatgagaatcacttgaactcgggaggcggaggttgcagtgagacaagatagcaccgttgcagtgagacaagatagcaccattgcactccagcctgggcaataagagctaaactccgtctcaaaaacaaacaaacaaaaaaaaaaaattcctgctttttctttgcctaaatttttatcaaatattttgaacagaagccacatgtatttctacactacaagaaaagcataagttcagaaataagtaatcataccccctagtcaaacttaactataggaaggaaggacaggacaggacaggaaaggaggagaaaaaagaaattagctgggtatactcaggaggctgaggcaggaggatggcttgagcccaggaatttgaggctgcagtgtactatgacagcctgggcatcatagcaatgtctttgaaaaaaaaaaggatggccgggcacggtggctcacgcctgtaatcccagcactctgggaggccgaggcgggaggatcacaaggtcaggagatcgggaccatcatggctaacatggtgaaaccccatctctgctaaaactacaaaaaaaaattagccaggcgtggtggcgggtacctgtagtcccagccactgcactctagcctgggcgacagagcaagactccatctcaaaaaaaaaaggaaaaggaaaaagaaaaaagaacacacctcaccaattttgaaatgtgaacatacaacaaataaagcaatattttttggaactcatcactttgcattgaattaggcatggaacaaacactaagcatttgttaagagaacgatgctctggatttaaattatatatcctgtattctaagatcctcattactcaattgataggcaagcctggacctggggggaagtggactaatcagaaacacaaccctgcattccttccctttggctgacttatacaaatataagaataaaatttaattgacaaaggataacagcatttataagtaagattgttatgctggagatatgttaattaagtcctctggattaaaggctaaaactcaattttacctgcatgaattgattacagagaaaattaccaggtcctttgctcctttttaagagaactgtggtagaactttttaagagaactgtttctggtagaaaacaattcttaagtcacacaacctcaaaagttaaaagtgctggcttttgaagaggttgtttgaaatgctttggaaaaatgcacaacagtttaagtagtaaataatattaagccattacaaatcaggacaaatattaacagaccttccatacaacttctatgtatctcttcaatatgccctttgcctacagcactctgggcacaaaaatctggggaaaactaagatctgtttattggagctttttaccttctacccagaaaagttagttcgtgtttaattctgacattacacagtacttaagacattcaaagcaactgcagtgatacaactctatgctaagttttttttaaatcagtaaacttaacccacaactcacaatattttaatcaggagctctggaagtaagggtatttttctgtttttttccataccctctgaggttgaaatttttttgctcttttactctgaataatacctaaaccctctctagggagagaaatattttattcctaaatgacattattaacgcatttttctacagatattaaagtactggagatatgctgtttcctgcttatcaggaaattaaaatccctttcatttatgtagtttgattttttatagcgctttcacatatattcacttgaacgtatacacgacacaaacatataacaaatttagacttatcaggcatacaagatgaccctcagcctgaacttattcaaacttaacttactcgatttcacatcgtcttgatgctaacaaaattaagcatgagcataatgaaatcggtatcactgccagttctcaatgaacaaaaagaaaaccaaattcgcccatttcgcaaaggaaaagtactcccaatcagacaatcgcaaaaaaaagaacaaaatctaaaccatacattcacgtacatcttttcaactcagagctccaaacgcagccgccaaccacacaactgcccacaatcacagcggtagcgcctactcttaattttgaagctagagacttaaggaaacacacacacacacaaaacagttctcaagtttgacaaagtgggggaaaagtcattttaagtaaagacaacgagttaatcaggaggcgatgagcccagtccttccgccccgctttcccgcttccagccctcgaacgaaccctcctctaacccccgggaggcaggagttccagcggggagatgcgggaagcctcagacgagcccgcacgccgccggagacgcagggatcgaggtcggggagacaaagagcagcccgcgaagagcccgggcggcgaggggcggcccggctccgccctgcgcccctaaccgcccgggtagttgtcggcaccgccggggcgccgccgagtgcgcgccgcttctgtccgggctccccgaccgtcgcccgacacctccgcggcccaggacacccccgagccgtttccctcccgatttgggagccgcgcgcctggggacaaagagggagggtgcgccggggacagtggcaggacgcgggccggcgacgcccctccggactcggcgggaacccctcggcggcgcccccctccttctcccgctctggccgcgctcctccccggacctccggaggttctcctcggcccctccccgggctccccaagagttctcccgcctccccctgggaccccgcccctggcccgcttctcctcagccggccctgcggccgcccctcacccggcggcgggttcccccggagccgcctcctccgccgggcctcggcccgtcccgccggtcgcggcctcatgtgccccgcgtcgccatcgccttcaccctcgcctctcctccacctcctccgccgctgccgccttcgcctcagtctccagccgaggcagaagccgctcccgccgctgccgccgccgccgccgcctcccgctcccgccgccgcgacccgcgggaaggcgcctgcgcactgcgcgctgcggtgggggcgggggcgtcccgccgcggcccgggagcggggggcgcgcggcacgtggcgctcgagtgggaggggggcgccccagaacgcgcgggaagcgacgcgagcgccaactttccgcggtcgagtcctcgccgctctctcggatagtccgggacgcggcggaggcgcggcgcgcgtgggagtcacccgcgtggagtctggaccccgggtgggcgcagacttcgctccggacagttcattcttccaagctgattttcgggcgagagtcccccgccagccgcgcctcagtttgagcgggccgctaacggcgccgtgggttctcgccttacctgggtatcctgggttggtttagcgggcccagagttgtcttctgcgcgctccgccgaggccttggtccattgtagcacgggatgctaatgtctcctcccaggttctgctctacaattcctcgaggatctggcgggccctgcgtggatctagctagagtcggggctcttagcagtgctctagatacttttcaggtcctgaacttctcggattagcaagaccctaataggctatttcctcttaactctttgcatcccagcaggatcccattcagaggacttgggaaaaattttcatgcataggaatccccag
